(19) United States
(12) Patent Application Publication
(10) Pub. No.: US 2014/0304858 A1
(43) Pub. Date: Oct. 9, 2014

(54) PLANTS HAVING ENHANCED YIELD-RELATED TRAITS AND PRODUCING METHODS THEREOF

(71) Applicant: BASF Plant Science Company GmbH, Ludwigshafen (DE)

(72) Inventors: Ana Isabel Sanz Molinero, Madrid (ES); Yves Hatzfeld, Lille (FR)

(21) Appl. No.: 14/352,793

(22) PCT Filed: Oct. 12, 2012
(86) PCT No.: PCT/IB2012/055538

§ 371 Date: Apr. 18, 2014

Related U.S. Application Data
(60) Provisional application No. 61/549,293, filed on Oct. 20, 2011.
(60) Provisional application No. 61/563,571, filed on Nov. 24, 2011.

(30) Foreign Application Priority Data
Oct. 20, 2011 (EP) 11185971.6
Nov. 24, 2011 (EP) 11190631.9

(51) Int. Cl. C12N 15/82

(52) U.S. Cl. CPC C12N 15/8261
USPC 800/290; 800/298; 435/320.1

(57) ABSTRACT

Provided is a method for enhancing yield-related traits in plants by modulating expression in a plant of a nucleic acid encoding a HhH-GPD-related polypeptide, or a calnexin-related polypeptide. Also provided are plants having modulated expression of a nucleic acid encoding a HhH-GPD-related polypeptide, or a calnexin-related polypeptide, which plants have enhanced yield-related traits relative to control plants.

### BACKGROUND

[0001] The present invention relates generally to the field of molecular biology and concerns a method for enhancing yield-related traits in plants by modulating expression in a plant of a nucleic acid encoding an HhH-GPD-related polypeptide, or a calnexin-related polypeptide. The present invention also concerns plants having modulated expression of a nucleic acid encoding an HhH-GPD-related polypeptide, or a calnexin-related polypeptide, which plants have enhanced yield-related traits relative to corresponding wild type plants or other control plants. The invention also provides constructs useful in the methods of the invention.

[0002] The ever-increasing world population and the dwindling supply of arable land available for agriculture fuels research towards increasing the efficiency of agriculture. Conventional means for crop and horticultural improvements utilise selective breeding techniques to identify plants having desirable characteristics. However, such selective breeding techniques have several drawbacks, namely that these techniques are typically labour intensive and result in plants that often contain heterogeneous genetic components that may not always result in the desirable trait being passed on from parent plants. Advances in molecular biology have allowed mankind to modify the germplasm of animals and plants. Genetic engineering of plants entails the isolation and manipulation of genetic material (typically in the form of DNA or RNA) and the subsequent introduction of that genetic material into a plant. Such technology has the capacity to deliver crops or plants having various improved economic, agronomic or horticultural traits.

[0003] A trait of particular economic interest is increased yield. Yield is normally defined as the measurable produce of economic value from a crop. This may be defined in terms of quantity and/or quality. Yield is directly dependent on several factors, for example, the number and size of the organs, plant architecture (for example, the number of branches), seed production, leaf senescence and more. Root development, nutrient uptake, stress tolerance and early vigour may also be important factors in determining yield. Optimizing the abovementioned factors may therefore contribute to increasing crop yield.

[0004] Seed yield is a particularly important trait, since the seeds of many plants are important for human and animal nutrition. Crops such as corn, rice, wheat, canola and soybean account for over half the total human caloric intake, whether through direct consumption of the seeds themselves or through consumption of meat products raised on processed seeds. They are also a source of sugars, oils and many kinds of metabolites used in industrial processes. Seeds contain an embryo (the source of new shoots and roots) and an endosperm (the source of nutrients for embryo growth during germination and during early growth of seedlings). The development of a seed involves many genes, and requires the transfer of metabolites from the roots, leaves and stems into the growing seed. The endosperm, in particular, assimilates the metabolic precursors of carbohydrates, oils and proteins and synthesizes them into storage macromolecules to fill out the grain.

[0005] Another important trait for many crops is early vigour. Improving early vigour is an important objective of modern rice breeding programs in both temperate and tropical rice cultivars. Long roots are important for proper soil anchorage in water-seeded rice. Where rice is sown directly into flooded fields, and where plants must emerge rapidly through water, longer shoots are associated with vigour. Where drill-seeding is practiced, longer mesocotyls and coleoptiles are important for good seedling emergence. The ability to engineer early vigour into plants would be of great importance in agriculture. For example, poor early vigour has been a limitation to the introduction of maize (Zea mays L.) hybrids based on Corn Belt germplasm in the European Atlantic.

[0006] A further important trait is that of improved abiotic stress tolerance. Abiotic stress is a primary cause of crop loss worldwide, reducing average yields for most major crop plants by more than 50% (Wang et al., Planta 218, 1-14, 2003). Abiotic stresses may be caused by drought, salinity, extremes of temperature, chemical toxicity and oxidative stress. The ability to improve plant tolerance to abiotic stress would be of great economic advantage to farmers worldwide and would allow for the cultivation of crops during adverse conditions and in territories where cultivation of crops may not otherwise be possible.

[0007] Crop yield may therefore be increased by optimising one of the above-mentioned factors.

[0008] With respect to HhH-GPD-related polypeptides, however, nothing is reported on modification of certain yield-related traits in plants by using an HhH-GPD-related polypeptide until the present day. HhH-GPD-related polypeptide gets its name from its hallmark helix-hairpin-helix and Gly/Pro rich loop followed by a conserved aspartate. Tuteja, 2001 reports on molecular mechanisms of DNA damage and repair within plants. Particularly, a variety of different DNA repair pathways are described that include direct reversal, base excision repair, nucleotide excision repair, photo-reactivation, bypass, double-strand break repair pathway, and mismatch repair pathway. The Arabidopsis genome data indicated that the DNA repair is more highly conserved between plants and mammals than within the animal kingdom, perhaps reflecting common factors such as DNA methylation. Further, all possible mechanisms of DNA damage and repair in general and an up-to-date progress in plants are described. In addition, various types of DNA damage products, free radical production, lipid peroxidation, role of ozone, desiccation damage of plant seed, DNA integrity in pollen, and the role of DNA helicases in damage and repair and the repair genes in Arabidopsis genome are also described.

[0009] Murphy and George, 2005 report on the comparison of two DNA base excision repair glycosylases from Arabidopsis thaliana. Particularly, the specificities of Arabidopsis formamidopyrimidine-DNA glycosylase (FPG) and oxoguanine glycosylase (OGG) were compared, both being purified from Escherichia coli expression clones. Using depurinated DNA as substrate, the specific activity of Arabidopsis FPG was higher than that of Arabidopsis OGG. Using DNA oxidized by treatment with light in the presence of methylene blue, the specific activities of Arabidopsis FPG and OGG were equal. Using an oligonucleotide containing one oxoguanine (paired with C) and labeled with fluorescein, the specific activity of Arabidopsis OGG was greater than that of FPG. The results support the hypothesis that genes for the two enzymes have been retained during evolution of plants for their specialized enzyme activities.

[0010] With respect to calnexin-related polypeptides, however, nothing is reported on modification of yield-related traits in plants with regard to calnexin-related polypeptide until the present day. Calnexin (CNX) is a 90 kDa integral protein of the endoplasmic reticulum (ER). It consists of a large (50 kDa) N-terminal calcium-binding lumenal domain, a transmembrane helix and an acidic cytoplasmic tail having, for example, 90 residues. Calnexin is one of the chaperone molecules, which are characterized by their main function of assisting protein folding and quality control, ensuring that only properly folded and assembled proteins proceed further along the secretory pathway.

[0011] The function of calnexin is to retain unfolded or unassembled N-linked glycoproteins in the endoplasmic reticulum. Calnexin binds only those N-glycoproteins that have GlcNAc2Man9Glc1 oligosaccharides. Oligosaccharides with three sequential glucose residues are added to asparagine residues of the nascent proteins in the ER. The mono-glucosylated oligosaccharides that are recognized by calnexin result from the trimming of two glucose residues by the sequential action of two glucosidases, I and II. Glucosidase II can also remove the third and last glucose residue. If the glycoprotein is not properly folded, an enzyme called UGGT (for UDP-glucose:glycoprotein glucosyltransferase) will add the glucose residue back onto the oligosaccharide thus regenerating the glycoprotein's ability to bind to calnexin. The improperly-folded glycoprotein chain thus loiters in the ER, risking the encounter with MNS1 (alpha-mannosidase), which eventually sentences the underperforming glycoprotein to degradation by removing its mannose residue. If the protein is correctly translated, the chance of it being correctly folded before it encounters MNS1 is high. ATP and calcium ions are two of the cofactors involved in substrate binding for calnexin. Calnexin also functions as a chaperone for the folding of MHC class I alpha chain in the membrane of the ER. After folding is completed calnexin is replaced by calreticulin, which assists in further assembly of MHC class I.

[0012] Del Bem, 2011 describes on calreticulin and calnexin are Ca(2+)-binding chaperones localized in the endoplasmic reticulum of eukaryotes acting in glycoprotein folding quality control and Ca(2+) homeostasis. The evolutionary histories of calreticulin and calnexin gene families were inferred by comprehensive phylogenetic analyses using 18 completed genomes and ESTs covering the major green plants groups, from green algae to angiosperms. Calreticulin and calnexin possibly share a common origin, and both proteins are present along all green plants lineages. The calreticulin founder gene within green plants duplicated in early tracheophytes leading to two possible groups of orthologs with specialized functions, followed by lineage-specific gene duplications in spermatophytes. Calnexin founder gene in land plants was inherited from basal green algae during evolution in a very conservative copy number.

[0013] Nouri, 2010 reports a study on the soybean plasma membrane proteome under osmotic stress, wherein two methods were used: a gel-based and a LC MS/MS-based proteomics method. Two-day-old seedlings were subjected to 10% PEG for 2 days. Plasma membranes were purified from seedlings using a two-phase partitioning method and their purity was verified by measuring ATPase activity. Using the gel-based proteomics, four and eight protein spots were identified as up- and down-regulated, respectively, whereas in the nanoLC MS/MS approach, 11 and 75 proteins were identified as up- and down-regulated, respectively, under PEG treatment. Out of osmotic stress responsive proteins, most of the transporter proteins and all proteins with high number of transmembrane helices as well as low-abundance proteins could be identified by the LC MS/MS-based method. Three homologues of plasma membrane H(+)-ATPase, which are transporter proteins involved in ion efflux, were up-regulated under osmotic stress. Gene expression of this protein was increased after 12 h of stress exposure. Among the identified proteins, seven proteins were mutually identified by using two proteomics techniques, in which calnexin was the highly upregulated protein. Accumulation of calnexin in plasma membrane was confirmed by immunoblot analysis. These results suggest that under hyperosmotic conditions, calnexin accumulates in the plasma membrane and ion efflux accelerates by up-regulation of plasma membrane H(+)-ATPase protein.

[0014] Depending on the end use, the modification of certain yield traits may be favoured over others. For example for applications such as forage or wood production, or bio-fuel resource, an increase in the vegetative parts of a plant may be desirable, and for applications such as flour, starch or oil production, an increase in seed parameters may be particularly desirable. Even amongst the seed parameters, some may be favoured over others, depending on the application. Various mechanisms may contribute to increasing seed yield, whether that is in the form of increased seed size or increased seed number.

[0015] It has now been found that modulating expression in a plant of a nucleic acid encoding a HhH-GPD-related polypeptide gives plants having enhanced yield-related traits relative to control plants. The HhH-GPD-related polypeptide comprises a HhH-GPD-domain consisting of helix-hairpin-helix and Gly/Pro rich loop followed by a conserved aspartate. Further, the HhH-GPD-related polypeptide comprises a DNA glycosylase domain.

[0016] It has now also been found that various yield-related traits may be improved in plants by modulating expression in a plant of a nucleic acid encoding a calnexin-related polypeptide in a plant.

### DETAILED DESCRIPTION OF THE INVENTION

[0017] The present invention shows that modulating expression in a plant of a nucleic acid encoding an HhH-GPD-related polypeptide, or a calnexin-related polypeptide, gives plants having enhanced yield-related traits relative to control plants.

[0018] According to a first embodiment, the present invention provides a method for enhancing yield-related traits in plants relative to control plants, comprising modulating expression in a plant of a nucleic acid encoding an HhH-GPD-related polypeptide, or a calnexin-related polypeptide, and optionally selecting for plants having enhanced yield-related traits. According to another embodiment, the present invention provides a method for producing plants having enhanced yield-related traits relative to control plants, wherein said method comprises the steps of modulating expression in said plant of a nucleic acid encoding an HhH-GPD-related polypeptide, or a calnexin-related polypeptide, as described herein and optionally selecting for plants having enhanced yield-related traits.

[0019] A preferred method for modulating expression of a nucleic acid encoding an HhH-GPD-related polypeptide, or a calnexin-related polypeptide, is by introducing and expressing in a plant a nucleic acid encoding an HhH-GPD-related polypeptide, or a calnexin-related polypeptide.

[0020] Any reference hereinafter to a “protein useful in the methods of the invention” is taken to mean an HhH-GPD-related polypeptide, or a calnexin-related polypeptide, as defined herein. Any reference hereinafter to a “nucleic acid useful in the methods of the invention” is taken to mean a nucleic acid capable of encoding such an HhH-GPD-related polypeptide, or a calnexin-related polypeptide. In one embodiment any reference to a protein or nucleic acid “useful in the methods of the invention” is to be understood to mean proteins or nucleic acids “useful in the methods, constructs, plants, harvestable parts and products of the invention”. The nucleic acid to be introduced into a plant (and therefore useful in performing the methods of the invention) is any nucleic acid encoding the type of protein which will now be described, hereafter also named “HhH-GPD-related nucleic acid” or “HhH-GPD-related gene” or “calnexin-related nucleic acid” or “calnexin-related gene”.

[0021] An “HhH-GPD-related polypeptide” as used and defined herein refers to any polypeptide comprising an HhH-GPD-domain as described and listed herein under Table B1 comprising a Helix-hairpin-helix and Gly/Pro rich loop followed by a conserved aspartate. Particularly, the helix-turn-helix (HTH) as described and listed herein under Table B1 is a major structural motif capable of binding DNA. It comprises two a helices joined by a short strand of amino acids. In particular, recognition and binding to DNA is done by the two a helices, one occupying the N-terminal end of the motif, the other at the C-terminus, stabilizing the interaction between protein and DNA. Further, the HhH-GPD-related polypeptide comprises DNA repair proteins such as DNA glycosylase as described and listed herein under Table B1.

[0022] In one embodiment of the invention, the HhH-GPD-related polypeptide as used and defined herein comprises one or more of the domain(s) described and listed herein under Example 4.

[0023] The term “HhH-GPD-related polypeptide” as used herein also intends to include homologues as defined hereunder of “HhH-GPD-related polypeptide”.

[0024] According to one embodiment, there is provided a method for improving yield-related traits as provided herein in plants relative to control plants, comprising modulating expression in a plant of a nucleic acid encoding a HhH-GPD-related polypeptide as defined herein.

[0025] In one embodiment, the HhH-GPD-related polypeptide as used herein comprises at least one of the motifs 1, 2 or 3:

Motif 1 (SEQ ID NO: 73):
WSVHMFMI[FN]SLHRPD
Motif 2 (SEQ ID NO: 74):
[KR]WRPYRSV[GA][SA]WY[ML]WR
Motif 3 (SEQ ID NO: 75):
[IF]GVSGRKASYLHDLA

[0026] Motifs 1 to 3 were derived using the MEME algorithm (Bailey and Elkan, Proceedings of the Second International Conference on Intelligent Systems for Molecular Biology, pp. 28-36, AAAI Press, Menlo Park, Calif., 1994). At each position within a MEME motif, the residues are shown that are present in the query set of sequences with a frequency higher than 0.2. Residues within square brackets represent alternatives.

[0027] More preferably, the HhH-GPD-related polypeptide comprises in increasing order of preference, at least 2, or all 3 motifs as defined herein.

[0028] In a particular embodiment, the HhH-GPD-related polypeptide is represented by SEQ ID NO: 2.

[0029] Additionally or alternatively, the homologue of a HhH-GPD-related polypeptide has in increasing order of preference at least 25%, 26%, 27%, 28%, 29%, 30%, 31%, 32%, 33%, 34%, 35%, 36%, 37%, 38%, 39%, 40%, 41%, 42%, 43%, 44%, 45%, 46%, 47%, 48%, 49%, 50%, 51%, 52%, 53%, 54%, 55%, 56%, 57%, 58%, 59%, 60%, 61%, 62%, 63%, 64%, 65%, 66%, 67%, 68%, 69%, 70%, 71%, 72%, 73%, 74%, 75%, 76%, 77%, 78%, 79%, 80%, 81%, 82%, 83%, 84%, 85%, 86%, 87%, 88%, 89%, 90%, 91%, 92%, 93%, 94%, 95%, 96%, 97%, 98%, or 99% overall sequence identity to the amino acid represented by SEQ ID NO: 2, provided that the homologous protein comprises any one or more of the conserved motifs as outlined above. The overall sequence identity is determined using a global alignment algorithm, such as the Needleman Wunsch algorithm in the program GAP (GCG Wisconsin Package, Accelrys), preferably with default parameters and preferably with sequences of mature proteins (i.e. without taking into account secretion signals or transit peptides). In one embodiment the sequence identity level is determined by comparison of the polypeptide sequences over the entire length of the sequence of SEQ ID NO: 2.

[0030] Compared to overall sequence identity, the sequence identity will generally be higher when only conserved domains or motifs are considered. Preferably the motifs in HhH-GPD-related polypeptide have, in increasing order of preference, at least 70%, 71%, 72%, 73%, 74%, 75%, 76%, 77%, 78%, 79%, 80%, 81%, 82%, 83%, 84%, 85%, 86%, 87%, 88%, 89%, 90%, 91%, 92%, 93%, 94%, 95%, 96%, 97%, 98%, or 99% sequence identity to any one or more of the motifs represented by SEQ ID NO: 73 to SEQ ID NO: 75 (Motifs 1 to 3).

[0031] In other words, in another embodiment a method is provided wherein said HhH-GPD-related polypeptide comprises a conserved domain (or motif) with at least 70%, 71%, 72%, 73%, 74%, 75%, 76%, 77%, 78%, 79%, 80%, 81%, 82%, 83%, 84%, 85%, 86%, 87%, 88%, 89%, 90%, 91%, 92%, 93%, 94%, 95%, 96%, 97%, 98%, or 99% sequence identity to the conserved domain starting with amino acid 169 up to amino acid 313 in SEQ ID NO: 2.

[0032] A “calnexin-related polypeptide” as used and defined herein comprises Ca(2+)-binding chaperone as described herein under Example 4. Particularly, the calnexin-related polypeptide comprises one or more of N-terminal calcium-binding lumenal domain, a transmembrane helix, an acidic cytoplasmic tail having, for example, 90 residues, or all of them. Moreover, “calnexin-related polypeptide” as used herein comprises three motifs as used and defined herein and further exemplified in FIG. 5.

[0033] According one embodiment, there is provided a method for improving yield-related traits as provided herein in plants relative to or compared to control plants, comprising modulating expression in a plant of a nucleic acid encoding a calnexin-related polypeptide as defined herein.

[0034] Motifs 4 to 6 were derived using the MEME algorithm (Bailey and Elkan, Proceedings of the Second International Conference on Intelligent Systems for Molecular Biology, pp. 28-36, AAAI Press, Menlo Park, Calif., 1994). At each position within a MEME motif, the residues are shown that are present in the query set of sequences with a frequency higher than 0.2. Residues within square brackets represent alternatives.

[0035] In one embodiment, the calnexin-related polypeptide as used herein comprises at least one of the motifs 4, 5 or 6.

Motif 4 (SEQ ID NO: 254):
SPYSIMFGPDKCG[AT]TNKVHF
Motif 5 (SEQ ID NO: 255):
[TV]R[LF]Q[NES]GLECGGAY[LI]KYLRPQ
Motif 6 (SEQ ID NO: 256):
GCGEWK[RK]PMKRNPAYKGKW[HS]

[0036] In still another embodiment, the calnexin-related polypeptide comprises in increasing order of preference, at least 2, or all 3 motifs as defined above.

[0037] In a particular embodiment, the calnexin-related polypeptide is represented by SEQ ID NO: 81.

[0038] Additionally or alternatively, the calnexin-related protein has in increasing order of preference at least 25%, 26%, 27%, 28%, 29%, 30%, 31%, 32%, 33%, 34%, 35%, 36%, 37%, 38%, 39%, 40%, 41%, 42%, 43%, 44%, 45%, 46%, 47%, 48%, 49%, 50%, 51%, 52%, 53%, 54%, 55%, 56%, 57%, 58%, 59%, 60%, 61%, 62%, 63%, 64%, 65%, 66%, 67%, 68%, 69%, 70%, 71%, 72%, 73%, 74%, 75%, 76%, 77%, 78%, 79%, 80%, 81%, 82%, 83%, 84%, 85%, 86%, 87%, 88%, 89%, 90%, 91%, 92%, 93%, 94%, 95%, 96%, 97%, 98%, or 99% overall sequence identity to the amino acid sequence represented by SEQ ID NO: 81, provided that the homologous protein comprises any one or more of the conserved motifs as outlined above. The overall sequence identity is determined using a global alignment algorithm, such as the Needleman Wunsch algorithm in the program GAP (GCG Wisconsin Package, Accelrys), preferably with default parameters and preferably with sequences of mature proteins (i.e. without taking into account secretion signals or transit peptides). In one embodiment the sequence identity level is determined by comparison of the polypeptide sequences over the entire length of the sequence of SEQ ID NO: 81.

[0039] In another embodiment, the sequence identity level is determined by comparison of one or more conserved domains or motifs in SEQ ID NO: 81 with corresponding conserved domains or motifs in other calnexin-related polypeptides. Compared to overall sequence identity, the sequence identity will generally be higher when only conserved domains or motifs are considered. Preferably the motifs in a calnexin-related polypeptide have, in increasing order of preference, at least 70%, 71%, 72%, 73%, 74%, 75%, 76%, 77%, 78%, 79%, 80%, 81%, 82%, 83%, 84%, 85%, 86%, 87%, 88%, 89%, 90%, 91%, 92%, 93%, 94%, 95%, 96%, 97%, 98%, or 99% sequence identity to any one or more of the motifs represented by SEQ ID NO: 254 to SEQ ID NO: 256 (motifs 4 to 6).

[0040] The terms “domain”, “signature” and “motif” are defined in the “definitions” section herein.

[0041] Furthermore, HhH-GPD-related polypeptides (at least in their native form) typically have enzymatic activity, particularly catalytic activity, particularly DNA repairing activity, more particularly base-excision repair activity. Tools and techniques for measuring activity as mentioned herein are known in the art. Further details are provided in Example 6. In addition, HhH-GPD-related polypeptide, when expressed in rice according to the methods of the present invention as outlined in Examples 7 and 8, give plants having increased yield related traits, in particular at least one of (leafy) biomass (AreaMax), time to flower (TimetoFlower), total root biomass (RootMax), total seed yield (Totalwgseeds), fill rate, harvest index, number of filled seeds (nrfilledseed), taller more erect plants (HeightMax), height of the plant (GravityYMax), amount of thick roots (RootThickMax) as outlined in Example 11.

[0042] Further, plants expressing HhH-GPD-related polypeptide according to the methods of the present invention as outlined in Examples 7 and 8, showed in one or more lines having increased yield related traits, in particular early development (AreaEmer), increased amount of thin roots (RootThinMax), increased amount of root and shoot biomass (RootShInd), increased number of florets per panicle on a plant (flowerperpan), short time to accruing biomass (AreaCycl) as outlined in Example 11.

[0043] In one embodiment of the present invention the function of the nucleic acid sequences of the invention is to confer information for synthesis of the HhH-GPD-related polypeptide that increases yield or yield related traits, when such a nucleic acid sequence of the invention is transcribed and translated in a living plant cell.

[0044] Nucleic acids encoding calnexin-related polypeptides, when expressed in rice according to the methods of the present invention as outlined in Examples 7 and 8, give plants having increased yield-related traits, in particular one or more of increased total root biomass (RootMax), a faster growth rate (a shorter time (in days) needed between sowing and the day the plant reaches 90% of its final biomass (AreaCycl)), early greenness at the time point before the flowering time point (EarlyGN), late greenness at the time point after or at the flowering time point (LateGN), increased relative growth (RGR). Another function of the nucleic acid sequences encoding calnexin-related polypeptides is to confer information for synthesis of the calnexin-related protein that increases yield or yield-related traits as described herein, when such a nucleic acid sequence of the invention is transcribed and translated in a living plant cell.

[0045] With respect to HhH-GPD-related polypeptides, the present invention is illustrated by transforming plants with the nucleic acid sequence represented by SEQ ID NO: 1, encoding the polypeptide sequence of SEQ ID NO: 2. However, performance of the invention is not restricted to these sequences; the methods of the invention may advantageously be performed using any HhH-GPD-related polypeptide-encoding nucleic acid or HhH-GPD-related polypeptide as defined herein.

[0046] Examples of nucleic acids encoding HhH-GPD-related polypeptides are given in Table A1 of the Examples section herein. Such nucleic acids are useful in performing the methods of the invention. The amino acid sequences given in Table A1 of the Examples section are example sequences of orthologues and paralogues of the HhH-GPD-related polypeptide represented by SEQ ID NO: 2, the terms “orthologues” and “paralogues” being as defined herein. Further orthologues and paralogues may readily be identified by performing a so-called reciprocal blast search as described in the definitions section.

[0047] With respect to calnexin-related polypeptides, the present invention is illustrated by transforming plants with the nucleic acid sequence represented by SEQ ID NO: 80, encoding the polypeptide sequence of SEQ ID NO: 81. However, performance of the invention is not restricted to these sequences; the methods of the invention may advantageously be performed using any calnexin-related-encoding nucleic acid or calnexin-related polypeptide as defined herein. The term “calnexin-related” or “calnexin-related polypeptide” as used herein also intends to include homologues as defined hereunder of SEQ ID NO: 81.

[0048] Examples of nucleic acids encoding calnexin-related polypeptides are given in Table A2 of the Examples section herein. Such nucleic acids are useful in performing the methods of the invention. The amino acid sequences given in Table A2 of the Examples section are example sequences of orthologues and paralogues of the calnexin-related polypeptide represented by SEQ ID NO: 81, the terms “orthologues” and “paralogues” being as defined herein. Further orthologues and paralogues may readily be identified by performing a so-called reciprocal blast search as described in the definitions section; where the query sequence is SEQ ID NO: 80 or SEQ ID NO: 81, the second BLAST (back-BLAST) would be against rice sequences.

[0049] Nucleic acid variants may also be useful in practising the methods of the invention. Examples of such variants include nucleic acids encoding homologues and derivatives of any one of the amino acid sequences given in Table A1 or A2 of the Examples section, the terms “homologue” and “derivative” being as defined herein. Also useful in the methods, constructs, plants, harvestable parts and products of the invention are nucleic acids encoding homologues and derivatives of orthologues or paralogues of any one of the amino acid sequences given in Table A1 or A2 of the Examples section. Homologues and derivatives useful in the methods of the present invention have substantially the same biological and functional activity as the unmodified protein from which they are derived. Further variants useful in practising the methods of the invention are variants in which codon usage is optimised or in which miRNA target sites are removed.

[0050] Further nucleic acid variants useful in practising the methods of the invention include portions of nucleic acids encoding HhH-GPD-related polypeptides, or calnexin-related polypeptides, nucleic acids hybridising to nucleic acids encoding HhH-GPD-related polypeptides, or calnexin-related polypeptides, splice variants of nucleic acids encoding HhH-GPD-related polypeptides, or calnexin-related polypeptides, allelic variants of nucleic acids encoding HhH-GPD-related polypeptides, or calnexin-related polypeptides, and variants of nucleic acids encoding HhH-GPD-related polypeptides, or calnexin-related polypeptides, obtained by gene shuffling. The terms hybridising sequence, splice variant, allelic variant and gene shuffling are as described herein.

[0051] Nucleic acids encoding HhH-GPD-related polypeptides, or calnexin-related polypeptides, need not be full-length nucleic acids, since performance of the methods of the invention does not rely on the use of full-length nucleic acid sequences. According to the present invention, there is provided a method for enhancing yield-related traits in plants, comprising introducing and expressing in a plant a portion of any one of the nucleic acid sequences given in Table A1 or A2 of the Examples section, or a portion of a nucleic acid encoding an orthologue, paralogue or homologue of any of the amino acid sequences given in Table A1 or A2 of the Examples section.

[0052] A portion of a nucleic acid may be prepared, for example, by making one or more deletions to the nucleic acid. The portions may be used in isolated form or they may be fused to other coding (or non-coding) sequences in order to, for example, produce a protein that combines several activities. When fused to other coding sequences, the resultant polypeptide produced upon translation may be bigger than that predicted for the protein portion.

[0053] With respect to HhH-GPD-related polypeptides, portions useful in the methods of the invention, encode HhH-GPD-related polypeptide as defined herein, and have substantially the same biological activity as the amino acid sequences given in Table A1 of the Examples section. Preferably, the portion is a portion of any one of the nucleic acids given in Table A1 of the Examples section, or is a portion of a nucleic acid encoding an orthologue or paralogue of any one of the amino acid sequences given in Table A1 of the Examples section. Preferably the portion is at least 500, 550, 600, 650, 700, 750, 800, 850, 900, 950, 1000, 1050, 1100, 1150, 1200, 1250, 1300, 1450, 1500, 1550, 1600, 1650, 1700, 1750, 1800, 1850, 1900, 1950, 2000 consecutive nucleotides in length, the consecutive nucleotides being of any one of the nucleic acid sequences given in Table A1 of the Examples section, or of a nucleic acid encoding an orthologue or paralogue of any one of the amino acid sequences given in Table A1 of the Examples section. Most preferably the portion is a portion of the nucleic acid of SEQ ID NO: 1.

[0054] With respect to calnexin-related polypeptides, portions useful in the methods of the invention, encode a calnexin-related polypeptide as defined herein or at least part thereof, and have substantially the same biological activity as the amino acid sequences given in Table A2 of the Examples section. Preferably, the portion is a portion of any one of the nucleic acids given in Table A2 of the Examples section, or is a portion of a nucleic acid encoding an orthologue or paralogue of any one of the amino acid sequences given in Table A2 of the Examples section. Preferably the portion is at least 500, 550, 600, 650, 700, 750, 800, 850, 900, 950, 1000, 1050, 1100, 1150, 1200, 1250, 1300, 1450, 1500, 1550, 1600, 1620, 1630 consecutive nucleotides in length, the consecutive nucleotides being of any one of the nucleic acid sequences given in Table A2 of the Examples section, or of a nucleic acid encoding an orthologue or paralogue of any one of the amino acid sequences given in Table A2 of the Examples section. Most preferably the portion is a portion of the nucleic acid of SEQ ID NO: 80.

[0055] Another nucleic acid variant useful in the methods, constructs, plants, harvestable parts and products of the invention is a nucleic acid capable of hybridizing, under reduced stringency conditions, preferably under high stringent conditions, with a nucleic acid encoding an HhH-GPD-related polypeptide, or a calnexin-related polypeptide, as defined herein, or with a portion as defined herein. According to the present invention, there is provided a method for enhancing yield-related traits in plants, comprising introducing and expressing in a plant a nucleic acid capable of hybridizing to the complement of a nucleic acid encoding any one of the proteins given in Table A1 or A2 of the Examples section, or to the complement of a nucleic acid encoding an orthologue, paralogue or homologue of any one of the proteins given in Table A1 or A2.

[0056] Hybridizing sequences useful in the methods, constructs, plants, harvestable parts and products of the invention encode an HhH-GPD-related polypeptide, or a calnexin-related polypeptide, as defined herein, having substantially the same biological activity as the amino acid sequences given in Table A1 or A2 of the Examples section. Preferably, the hybridizing sequence is capable of hybridizing to the complement of a nucleic acid encoding any one of the proteins given in Table A1 or A2 of the Examples section, or to a portion of any of these sequences, a portion being as defined herein, or the hybridizing sequence is capable of hybridizing to the complement of a nucleic acid encoding an orthologue or paralogue of any one of the amino acid sequences given in Table A1 or A2 of the Examples section.

[0057] With respect to HhH-GPD-related polypeptides, the hybridizing sequence is most preferably capable of hybridizing to the complement of a nucleic acid encoding the polypeptide as represented by SEQ ID NO: 2 or to a portion thereof. In one embodiment, the hybridization conditions are of medium stringency, preferably of high stringency, as defined above.

[0058] With respect to calnexin-related polypeptides, the hybridizing sequence is most preferably capable of hybridizing to the complement of a nucleic acid encoding the polypeptide as represented by SEQ ID NO: 81 or to a portion thereof. In one embodiment, the hybridization conditions are of medium stringency, preferably of high stringency, as defined herein.

[0059] Preferably, the hybridizing sequence encodes a polypeptide with an amino acid sequence which comprises motifs 4 to 6, and/or has at least 50%, 51%, 52%, 53%, 54%, 55%, 56%, 57%, 58%, 59%, 60%, 61%, 62%, 63%, 64%, 65%, 66%, 67%, 68%, 69%, 70%, 71%, 72%, 73%, 74%, 75%, 76%, 77%, 78%, 79%, 80%, 81%, 82%, 83%, 84%, 85%, 86%, 87%, 88%, 89%, 90%, 91%, 92%, 93%, 94%, 95%, 96%, 97%, 98%, or 99% sequence identity to SEQ ID NO: 81.

[0060] In another embodiment, there is provided a method for enhancing yield-related traits in plants, comprising introducing and expressing in a plant a splice variant of a nucleic acid encoding any one of the proteins given in Table A1 or A2 of the Examples section, or a splice variant of a nucleic acid encoding an orthologue, paralogue or homologue of any of the amino acid sequences given in Table A1 or A2 of the Examples section.

[0061] With respect to HhH-GPD-related polypeptides, preferred splice variants are splice variants of a nucleic acid represented by SEQ ID NO: 1, or a splice variant of a nucleic acid encoding an orthologue or paralogue of SEQ ID NO: 2.

[0062] With respect to calnexin-related polypeptides, preferred splice variants are splice variants of a nucleic acid represented by SEQ ID NO: 80, or a splice variant of a nucleic acid encoding an orthologue or paralogue of SEQ ID NO: 81. Preferably, the amino acid sequence encoded by the splice variant comprises motifs 4 to 6, and/or has at least 50%, 51%, 52%, 53%, 54%, 55%, 56%, 57%, 58%, 59%, 60%, 81%, 62%, 63%, 64%, 65%, 66%, 67%, 68%, 69%, 70%, 71%, 72%, 73%, 74%, 75%, 76%, 77%, 78%, 79%, 80%, 81%, 82%, 83%, 84%, 85%, 86%, 87%, 88%, 89%, 90%, 91%, 92%, 93%, 94%, 95%, 96%, 97%, 98%, or 99% sequence identity to SEQ ID NO: 81.

[0063] In yet another embodiment, there is provided a method for enhancing yield-related traits in plants, comprising introducing and expressing in a plant an allelic variant of a nucleic acid encoding any one of the proteins given in Table A1 or A2 of the Examples section, or comprising introducing and expressing in a plant an allelic variant of a nucleic acid encoding an orthologue, paralogue or homologue of any of the amino acid sequences given in Table A1 or A2 of the Examples section.

[0064] With respect to HhH-GPD-related polypeptides, the polypeptides encoded by allelic variants useful in the methods of the present invention have substantially the same biological activity as the HhH-GPD-related polypeptide of SEQ ID NO: 2 and any of the amino acids depicted in Table A1 of the Examples section. Allelic variants exist in nature, and encompassed within the methods of the present invention is the use of these natural alleles. Preferably, the allelic variant is an allelic variant of SEQ ID NO: 1 or an allelic variant of a nucleic acid encoding an orthologue or paralogue of SEQ ID NO: 2.

[0065] With respect to calnexin-related polypeptides, the polypeptides encoded by allelic variants useful in the methods of the present invention have substantially the same biological activity as the calnexin-related polypeptide of SEQ ID NO: 81 and any of the amino acid sequences depicted in Table A2 of the Examples section. Allelic variants exist in nature, and encompassed within the methods of the present invention is the use of these natural alleles. Preferably, the allelic variant is an allelic variant of SEQ ID NO: 80 or an allelic variant of a nucleic acid encoding an orthologue or paralogue of SEQ ID NO: 81. Preferably, the amino acid sequence encoded by the allelic variant comprises motifs 4 to 6, and/or has at least 50%, 51%, 52%, 53%, 54%, 55%, 56%, 57%, 58%, 59%, 60%, 61%, 62%, 63%, 64%, 65%, 66%, 67%, 68%, 69%, 70%, 71%, 72%, 73%, 74%, 75%, 76%, 77%, 78%, 79%, 80%, 81%, 82%, 83%, 84%, 85%, 86%, 87%, 88%, 89%, 90%, 91%, 92%, 93%, 94%, 95%, 96%, 97%, 98%, or 99% sequence identity to SEQ ID NO: 81.

[0066] In yet another embodiment, there is provided a method for enhancing yield-related traits in plants, comprising introducing and expressing in a plant a variant of a nucleic acid encoding any one of the proteins given in Table A1 or A2 of the Examples section, or comprising introducing and expressing in a plant a variant of a nucleic acid encoding an orthologue, paralogue or homologue of any of the amino acid sequences given in Table A1 or A2 of the Examples section, which variant nucleic acid is obtained by gene shuffling.

[0067] With respect to calnexin-related polypeptides, the amino acid sequence encoded by the variant nucleic acid obtained by gene shuffling preferably comprises motifs 4 to 6, and/or has at least 50%, 51%, 52%, 53%, 54%, 55%, 56%, 57%, 58%, 59%, 60%, 61%, 62%, 63%, 64%, 65%, 66%, 67%, 68%, 69%, 70%, 71%, 72%, 73%, 74%, 75%, 76%, 77%, 78%, 79%, 80%, 81%, 82%, 83%, 84%, 85%, 86%, 87%, 88%, 89%, 90%, 91%, 92%, 93%, 94%, 95%, 96%, 97%, 98%, or 99% sequence identity to SEQ ID NO: 81.

[0068] Furthermore, nucleic acid variants may also be obtained by site-directed mutagenesis. Several methods are available to achieve site-directed mutagenesis, the most common being PCR based methods (Current Protocols in Molecular Biology. Wiley Eds.).

[0069] HhH-GPD-related polypeptides differing from the sequence of SEQ ID NO: 2 by one or several amino acids (substitution(s), insertion(s) and/or deletion(s) as defined above) may equally be useful to increase the yield of plants in the methods and constructs and plants of the invention.

[0070] Calnexin-related polypeptides differing from the sequence of SEQ ID NO: 81 by one or several amino acids (substitution(s), insertion(s) and/or deletion(s) as defined herein) may equally be useful to increase the yield of plants in the methods and constructs and plants of the invention.

[0071] Nucleic acids encoding HhH-GPD-related polypeptides may be derived from any natural or artificial source. The nucleic acid may be modified from its native form in composition and/or genomic environment through deliberate human manipulation. Preferably the HhH-GPD-related polypeptide-encoding nucleic acid is from a plant, further preferably from a dicotyledonous plant, more preferably from the family Salicaceae, more preferably from the genus Populus, most preferably the nucleic acid is from Populus trichocarpa.

[0072] Nucleic acids encoding calnexin-related polypeptides may be derived from any natural or artificial source. The nucleic acid may be modified from its native form in composition and/or genomic environment through deliberate human manipulation. Preferably the calnexin-related polypeptide-encoding nucleic acid is from a plant, further preferably from a dicotyledonous plant, more preferably from the family Salicaceae, more preferably from the genus Populus, most preferably the nucleic acid is from Populus trichocarpa.

[0073] In another embodiment the present invention extends to recombinant chromosomal DNA comprising a nucleic acid sequence useful in the methods of the invention, wherein said nucleic acid is present in the chromosomal DNA as a result of recombinant methods, but is not in its natural genetic environment. In a further embodiment the recombinant chromosomal DNA of the invention is comprised in a plant cell. DNA comprised within a cell, particularly a cell with cell walls like a plant cell, is better protected from degradation than a bare nucleic acid sequence. The same holds true for a DNA construct comprised in a host cell, for example a plant cell.

[0074] Performance of the methods of the invention gives plants having one or more enhanced yield-related traits. In particular performance of the methods of the invention gives plants having increased early vigour and/or increased yield, especially increased biomass and/or increased seed yield relative to control plants. The terms “early vigour” “yield” and “seed yield” are described in more detail in the “definitions” section herein.

[0075] Reference herein to enhanced yield-related traits is taken to mean an increase in early vigour and/or in biomass (weight) of one or more parts of a plant, which may include (i) aboveground parts and preferably aboveground harvestable parts and/or (ii) parts below ground and preferably harvestable below ground. In particular, such harvestable parts are seeds, and performance of the methods of the invention results in plants having increased seed yield relative to the seed yield of control plants.

[0076] With respect to HhH-GPD-related polypeptides, the present invention provides a method for increasing yield-related traits, especially seed yield of plants, relative to control plants, which method comprises modulating expression in a plant of a nucleic acid encoding HhH-GPD-related polypeptide as defined herein.

[0077] With respect to calnexin-related polypeptides, the present invention thus provides a method for increasing yield-related traits, especially biomass, seed yield of plants, relative to or compared to control plants, which method comprises modulating expression in a plant of a nucleic acid encoding a calnexin-related polypeptide as defined herein.

[0078] According to a preferred feature of the present invention, performance of the methods of the invention gives plants having an increased growth rate relative to control plants. Therefore, according to the present invention, there is provided a method for increasing the growth rate of plants, which method comprises modulating expression in a plant of a nucleic acid encoding an HhH-GPD-related polypeptide, or a calnexin-related polypeptide, as defined herein.

[0079] Performance of the methods of the invention gives plants grown under non-stress conditions or under mild drought conditions increased yield-related traits relative to control plants grown under comparable conditions. Therefore, according to the present invention, there is provided a method for increasing yield-related traits in plants grown under non-stress conditions or under mild drought conditions, which method comprises modulating expression in a plant of a nucleic acid encoding an HhH-GPD-related polypeptide, or a calnexin-related polypeptide.

[0080] Performance of the methods of the invention gives plants grown under conditions of drought, increased yield-related traits relative to control plants grown under comparable conditions. Therefore, according to the present invention, there is provided a method for increasing yield-related traits in plants grown under conditions of drought which method comprises modulating expression in a plant of a nucleic acid encoding an HhH-GPD-related polypeptide, or a calnexin-related polypeptide.

[0081] Performance of the methods of the invention gives plants grown under conditions of nutrient deficiency, particularly under conditions of nitrogen deficiency, increased yield-related traits relative to control plants grown under comparable conditions. Therefore, according to the present invention, there is provided a method for increasing yield-related traits in plants grown under conditions of nutrient deficiency, which method comprises modulating expression in a plant of a nucleic acid encoding an HhH-GPD-related polypeptide, or a calnexin-related polypeptide.

[0082] Performance of the methods of the invention gives plants grown under conditions of salt stress, increased yield-related traits relative to control plants grown under comparable conditions. Therefore, according to the present invention, there is provided a method for increasing yield-related traits in plants grown under conditions of salt stress, which method comprises modulating expression in a plant of a nucleic acid encoding an HhH-GPD-related polypeptide, or a calnexin-related polypeptide.

[0083] The invention also provides genetic constructs and vectors to facilitate introduction and/or expression in plants of nucleic acids encoding HhH-GPD-related polypeptides, or calnexin-related polypeptides. The gene constructs may be inserted into vectors, which may be commercially available, suitable for transforming into plants or host cells and suitable for expression of the gene of interest in the transformed cells. The invention also provides use of a gene construct as defined herein in the methods of the invention.

[0084] More specifically, the present invention provides a construct comprising:
[0085] (a) a nucleic acid encoding an HhH-GPD-related polypeptide, or a calnexin-related polypeptide, as defined above;
[0086] (b) one or more control sequences capable of driving expression of the nucleic acid sequence of (a); and optionally
[0087] (c) a transcription termination sequence.

[0088] Preferably, the nucleic acid encoding HhH-GPD-related polypeptides, or calnexin-related polypeptides, is as defined above. The term “control sequence” and “termination sequence” are as defined herein.

[0089] The genetic construct of the invention may be comprised in a host cell, plant cell, seed, agricultural product or plant. Plants or host cells are transformed with a genetic construct such as a vector or an expression cassette comprising any of the nucleic acids described above. Thus the invention furthermore provides plants or host cells transformed with a construct as described above. In particular, the invention provides plants transformed with a construct as described above, which plants have increased yield-related traits as described herein.

[0090] In one embodiment the genetic construct of the invention confers increased yield or yield related traits(s) to a plant when it has been introduced into said plant, which plant expresses the nucleic acid encoding the HhH-GPD-related polypeptide, or calnexin-related polypeptide comprised in the genetic construct. In another embodiment the genetic construct of the invention confers increased yield or yield related traits(s) to a plant comprising plant cells in which the construct has been introduced, which plant cells express the nucleic acid encoding the HhH-GPD-related polypeptide, or calnexin-related polypeptide comprised in the genetic construct.

[0091] The promoter in such a genetic construct may be a non-native promoter to the nucleic acid described above, i.e. a promoter not regulating the expression of said nucleic acid in its native surrounding.

[0092] The expression cassettes or the genetic construct of the invention may be comprised in a host cell, plant cell, seed, agricultural product or plant.

[0093] The skilled artisan is well aware of the genetic elements that must be present on the genetic construct in order to successfully transform, select and propagate host cells containing the sequence of interest. The sequence of interest is operably linked to one or more control sequences (at least to a promoter).

[0094] Advantageously, any type of promoter, whether natural or synthetic, may be used to drive expression of the nucleic acid sequence, but preferably the promoter is of plant origin. A constitutive promoter is particularly useful in the methods. See the “Definitions” section herein for definitions of the various promoter types. With respect to calnexin-related polypeptides, also useful in the methods of the invention is a root-specific promoter.

[0095] The constitutive promoter is preferably a ubiquitous constitutive promoter of medium strength. More preferably it is a plant derived promoter, e.g. a promoter of plant chromosomal origin, such as a GOS2 promoter or a promoter of substantially the same strength and having substantially the same expression pattern (a functionally equivalent promoter), more preferably the promoter is the promoter GOS2 promoter from rice. Further preferably the constitutive promoter is represented by a nucleic acid sequence substantially similar to SEQ ID NO: 76, or SEQ ID NO: 259, most preferably the constitutive promoter is as represented by SEQ ID NO: 76, or SEQ ID NO: 259. See the “Definitions” section herein for further examples of constitutive promoters.

[0096] With respect to calnexin-related polypeptides, according to another preferred embodiment of the invention, the nucleic acid encoding a calnexin-related polypeptide is operably linked to a root-specific promoter. The root-specific promoter is preferably an RCc3 promoter (Plant Mol Biol. 1995 January; 27(2):237-48) or a promoter of substantially the same strength and having substantially the same expression pattern (a functionally equivalent promoter), more preferably the RCc3 promoter is from rice, further preferably the RCc3 promoter is represented by a nucleic acid sequence substantially similar to SEQ ID NO: 260, most preferably the promoter is as represented by SEQ ID NO: 260. Examples of other root-specific promoters which may also be used to perform the methods of the invention are shown in Table 2b in the “Definitions” section.

[0097] With respect to HhH-GPD-related polypeptides, it should be clear that the applicability of the present invention is not restricted to the HhH-GPD-related polypeptide-encoding nucleic acid represented by SEQ ID NO: 1, nor is the applicability of the invention restricted to expression of HhH-GPD-related polypeptide-encoding nucleic acid when driven by a constitutive promoter, or when driven by a root-specific promoter.

[0098] Optionally, one or more terminator sequences may be used in the construct introduced into a plant. Preferably, the construct comprises an expression cassette comprising a GOS2 promoter, substantially similar to SEQ ID NO: 76, operably linked to the nucleic acid encoding HhH-GPD-related polypeptide. More preferably, the construct comprises a zein terminator (t-zein) linked to the 3′ end of the HhH-GPD-related polypeptide coding sequence. Most preferably, the expression cassette comprises a sequence having in increasing order of preference at least 95%, at least 96%, at least 97%, at least 98%, at least 99% identity to the sequence represented by SEQ ID NO: 79 (pPRO::HhH-GPD-related polypeptide::t-zein sequence). Furthermore, one or more sequences encoding selectable markers may be present on the construct introduced into a plant.

[0099] With respect to calnexin-related polypeptides, it should be clear that the applicability of the present invention is not restricted to the calnexin-related polypeptide-encoding nucleic acid represented by SEQ ID NO: 80, nor is the applicability of the invention restricted to the rice GOS2 promoter when expression of a calnexin-related polypeptide-encoding nucleic acid is driven by a constitutive promoter.

[0100] Optionally, one or more terminator sequences may be used in the construct introduced into a plant. Those skilled in the art will be aware of terminator sequences that may be suitable for use in performing the invention. Preferably, the construct comprises an expression cassette comprising a GOS2 promoter, substantially similar to SEQ ID NO: 259, operably linked to the nucleic acid encoding the calnexin-related polypeptide. Furthermore, one or more sequences encoding selectable markers may be present on the construct introduced into a plant.

[0101] According to a preferred feature of the invention, the modulated expression is increased expression. Methods for increasing expression of nucleic acids or genes, or gene products, are well documented in the art and examples are provided in the definitions section. As mentioned above, a preferred method for modulating expression of a nucleic acid encoding an HhH-GPD-related polypeptide, or a calnexin-related polypeptide, is by introducing and expressing in a plant a nucleic acid encoding an HhH-GPD-related polypeptide, or a calnexin-related polypeptide; however the effects of performing the method, i.e. enhancing yield-related traits may also be achieved using other well known techniques, including but not limited to T-DNA activation tagging, TILLING, homologous recombination. A description of these techniques is provided in the definitions section.

[0102] The invention also provides a method for the production of transgenic plants having enhanced yield-related traits relative to control plants, comprising introduction and expression in a plant of any nucleic acid encoding an HhH-GPD-related polypeptide, or a calnexin-related polypeptide, as defined herein.

[0103] More specifically, the present invention provides a method for the production of transgenic plants having enhanced yield-related traits, particularly increased (seed) yield, which method comprises:
[0104] (i) introducing and expressing in a plant or plant cell a nucleic acid encoding an HhH-GPD-related polypeptide, or a calnexin-related polypeptide, or a genetic construct comprising a nucleic acid encoding an HhH-GPD-related polypeptide, or a calnexin-related polypeptide; and
[0105] (ii) cultivating the plant cell under conditions promoting plant growth and development.

[0106] The nucleic acid of (i) may be any of the nucleic acids capable of encoding an HhH-GPD-related polypeptide, or a calnexin-related polypeptide, as defined herein. Preferably the nucleic acid encoding the HhH-GPD-related polypeptide, or the calnexin-related polypeptide, and to be introduced into the plant is an isolated nucleic acid or is comprised in a genetic construct as described above.

[0107] Cultivating the plant cell under conditions promoting plant growth and development, may or may not include regeneration and/or growth to maturity. Accordingly, in a particular embodiment of the invention, the plant cell transformed by the method according to the invention is regenerable into a transformed plant. In another particular embodiment, the plant cell transformed by the method according to the invention is not regenerable into a transformed plant, i.e. cells that are not capable to regenerate into a plant using cell culture techniques known in the art. While plants cells generally have the characteristic of totipotency, some plant cells can not be used to regenerate or propagate intact plants from said cells. In one embodiment of the invention the plant cells of the invention are such cells. In another embodiment the plant cells of the invention are plant cells that do not sustain themselves in an autotrophic way. One example are plant cells that do not sustain themselves through photosynthesis by synthesizing carbohydrate and protein from such inorganic substances as water, carbon dioxide and mineral salt.

[0108] The nucleic acid may be introduced directly into a plant cell or into the plant itself (including introduction into a tissue, organ or any other part of a plant). According to a preferred feature of the present invention, the nucleic acid is preferably introduced into a plant or plant cell by transformation. The term “transformation” is described in more detail in the “definitions” section herein.

[0109] In one embodiment the present invention extends to any plant cell or plant produced by any of the methods described herein, and to all plant parts and propagules thereof.

[0110] The present invention encompasses plants or parts thereof (including seeds) obtainable by the methods according to the present invention. The plants or plant parts or plant cells comprise a nucleic acid transgene encoding an HhH-GPD-related polypeptide, or a calnexin-related polypeptide, as defined above, preferably in a genetic construct such as an expression cassette. The present invention extends further to encompass the progeny of a primary transformed or transfected cell, tissue, organ or whole plant that has been produced by any of the aforementioned methods, the only requirement being that progeny exhibit the same genotypic and/or phenotypic characteristic(s) as those produced by the parent in the methods according to the invention.

[0111] In a further embodiment the invention extends to seeds recombinantly comprising the expression cassettes of the invention, the genetic constructs of the invention, or the nucleic acids encoding the HhH-GPD-related polypeptide, or the calnexin-related polypeptide, and/or the HhH-GPD-related polypeptides, or the calnexin-related polypeptides, as described above.

[0112] The invention also includes host cells containing an isolated nucleic acid encoding an HhH-GPD-related polypeptide, or a calnexin-related polypeptide, as defined above. In one embodiment host cells according to the invention are plant cells, yeasts, bacteria or fungi. Host plants for the nucleic acids, construct, expression cassette or the vector used in the method according to the invention are, in principle, advantageously all plants which are capable of synthesizing the polypeptides used in the inventive method. In a particular embodiment the plant cells of the invention overexpress the nucleic acid molecule of the invention.

[0113] The methods of the invention are advantageously applicable to any plant, in particular to any plant as defined herein. Plants that are particularly useful in the methods of the invention include all plants which belong to the superfamily Viridiplantae, in particular monocotyledonous and dicotyledonous plants including fodder or forage legumes, ornamental plants, food crops, trees or shrubs. According to an embodiment of the present invention, the plant is a crop plant. Examples of crop plants include but are not limited to chicory, carrot, cassava, trefoil, soybean, beet, sugar beet, sunflower, canola, alfalfa, rapeseed, linseed, cotton, tomato, potato and tobacco. According to another embodiment of the present invention, the plant is a monocotyledonous plant. Examples of monocotyledonous plants include sugarcane. According to another embodiment of the present invention, the plant is a cereal. Examples of cereals include rice, maize, wheat, barley, millet, rye, triticale, sorghum, emmer, spelt, einkorn, teff, milo and oats. In a particular embodiment the plants of the invention or used in the methods of the invention are selected from the group consisting of maize, wheat, rice, soybean, cotton, oilseed rape including canola, sugarcane, sugar beet and alfalfa. Advantageously the methods of the invention are more efficient than the known methods, because the plants of the invention have increased yield and/or tolerance to an environmental stress compared to control plants used in comparable methods.

[0114] The invention also extends to harvestable parts of a plant such as, but not limited to seeds, leaves, fruits, flowers, stems, roots, rhizomes, tubers and bulbs, which harvestable parts comprise a recombinant nucleic acid encoding an HhH-GPD-related polypeptide, or a calnexin-related polypeptide. The invention furthermore relates to products derived or produced, preferably directly derived or directly produced, from a harvestable part of such a plant, such as dry pellets, meal or powders, oil, fat and fatty acids, starch or proteins. In one embodiment the product comprises a recombinant nucleic acid encoding an HhH-GPD-related polypeptide, or a calnexin-related polypeptide, and/or a recombinant HhH-GPD-related polypeptide, or calnexin-related polypeptide, for example as an indicator of the particular quality of the product.

[0115] The invention also includes methods for manufacturing a product comprising a) growing the plants of the invention and b) producing said product from or by the plants of the invention or parts thereof, including seeds. In a further embodiment the methods comprise the steps of a) growing the plants of the invention, b) removing the harvestable parts as described herein from the plants and c) producing said product from, or with the harvestable parts of plants according to the invention.

[0116] In one embodiment the products produced by the methods of the invention are plant products such as, but not limited to, a foodstuff, feedstuff, a food supplement, feed supplement, fiber, cosmetic or pharmaceutical. In another embodiment the methods for production are used to make agricultural products such as, but not limited to, plant extracts, proteins, amino acids, carbohydrates, fats, oils, polymers, vitamins, and the like.

[0117] In yet another embodiment the polynucleotides or the polypeptides of the invention are comprised in an agricultural product. In a particular embodiment the nucleic acid sequences and protein sequences of the invention may be used as product markers, for example where an agricultural product was produced by the methods of the invention. Such a marker can be used to identify a product to have been produced by an advantageous process resulting not only in a greater efficiency of the process but also improved quality of the product due to increased quality of the plant material and harvestable parts used in the process. Such markers can be detected by a variety of methods known in the art, for example but not limited to PCR based methods for nucleic acid detection or antibody based methods for protein detection.

[0118] The present invention also encompasses use of nucleic acids encoding HhH-GPD-related polypeptide, or calnexin-related polypeptide as described herein and use of these HhH-GPD-related polypeptides, or calnexin-related polypeptides, in enhancing any of the aforementioned yield-related traits in plants. For example, nucleic acids encoding HhH-GPD-related polypeptide, or calnexin-related polypeptide, described herein, or the HhH-GPD-related polypeptides, or the calnexin-related polypeptides, themselves, may find use in breeding programmes in which a DNA marker is identified which may be genetically linked to a gene encoding a HhH-GPD-related polypeptide, or a calnexin-related polypeptide. The nucleic acids/genes, or the HhH-GPD-related polypeptides, or the calnexin-related polypeptides, themselves may be used to define a molecular marker. This DNA or protein marker may then be used in breeding programmes to select plants having enhanced yield-related traits as defined herein in the methods of the invention. Furthermore, allelic variants of a nucleic acid/gene encoding a HhH-GPD-related polypeptide, or a calnexin-related polypeptides, may find use in marker-assisted breeding programmes. Nucleic acids encoding HhH-GPD-related polypeptides, or calnexin-related polypeptides, may also be used as probes for genetically and physically mapping the genes that they are a part of, and as markers for traits linked to those genes. Such information may be useful in plant breeding in order to develop lines with desired phenotypes.

[0119] In the following, the expression “as defined in claim/item X” is meant to direct the artisan to apply the definition as disclosed in item/claim X. For example, “a nucleic acid as defined in item 1” has to be understood so that the definition of the nucleic acid as in item 1 is to be applied to the nucleic acid. In consequence the term “as defined in item” or “as defined in claim” may be replaced with the corresponding definition of that item or claim, respectively.

[0120] With respect to HhH-GPD-related polypeptides, the present invention moreover relates to specific embodiments A to W:
[0121] A. A method for enhancing yield in plants relative to or compared to control plants, comprising modulating expression in a plant of a nucleic acid molecule encoding a HhH-GPD-related polypeptide, wherein said polypeptide comprises at least one Interpro domain IPR023170, Interpro domain IPR011257 or Interpro domain IPR003265, preferably all of them.
[0122] B. Method according to embodiment A, wherein said polypeptide comprises one or more of the following motifs:

Motif 1 (SEQ ID NO: 73):
WSVHMFMI[FN]SLHRPD
Motif 2 (SEQ ID NO: 74):
[KR]WRPYRSV[GA][SA]WY[ML]WR
Motif 3 (SEQ ID NO: 75):
[IF]GVSGRKASYLHDLA

[0123] C. Method according to embodiment A or B, wherein said modulated expression is effected by introducing and expressing in a plant a nucleic acid molecule encoding a HhH-GPD-related polypeptide.
[0124] D. Method according to any one of embodiments A to C, wherein said polypeptide is encoded by a nucleic acid molecule comprising a nucleic acid molecule selected from the group consisting of:
   [0125] (i) a nucleic acid represented by (any one of) SEQ ID NO: 1 or 3;
   [0126] (ii) the complement of a nucleic acid represented by (any one of) SEQ ID NO: 1 or 3;
   [0127] (iii) a nucleic acid encoding the polypeptide as represented by (any one of) SEQ ID NO: 2 or 4, preferably as a result of the degeneracy of the genetic code, said isolated nucleic acid can be deduced from a polypeptide sequence as represented by (any one of) SEQ ID NO: 2 or 4 and further preferably confers enhanced yield-related traits relative to or compared to control plants;
   [0128] (iv) a nucleic acid having, in increasing order of preference at least 30%, 31%, 32%, 33%, 34%, 35%, 36%, 37%, 38%, 39%, 40%, 41%, 42%, 43%, 44%, 45%, 46%, 47%, 48%, 49%, 50%, 51%, 52%, 53%, 54%, 55%, 56%, 57%, 58%, 59%, 60%, 61%, 62%, 63%, 64%, 65%, 66%, 67%, 68%, 69%, 70%, 71%, 72%, 73%, 74%, 75%, 76%, 77%, 78%, 79%, 80%, 81%, 82%, 83%, 84%, 85%, 86%, 87%, 88%, 89%, 90%, 91%, 92%, 93%, 94%, 95%, 96%, 97%, 98%, or 99% sequence identity with any of the nucleic acid sequences of SEQ ID NO: 1 and 3, and further preferably conferring enhanced yield-related traits relative to or compared to control plants, wherein the nucleic acid encodes a polypeptide that is not the polypeptide of any of the polypeptide sequence as represented by SEQ ID NO: 2 or 4;
   [0129] (v) a first nucleic acid molecule which hybridizes with a second nucleic acid molecule of (i) to (iv) under stringent hybridization conditions and preferably confers enhanced yield-related traits relative to or compared to control plants, wherein the first nucleic acid encodes a polypeptide that is not the polypeptide of any of the polypeptide sequence as represented by SEQ ID NO: 2 or 4;
   [0130] (vi) a nucleic acid encoding said polypeptide having, in increasing order of preference, at least 50%, 51%, 52%, 53%, 54%, 55%, 56%, 57%, 58%, 59%, 60%, 61%, 62%, 63%, 64%, 65%, 66%, 67%, 68%, 69%, 70%, 71%, 72%, 73%, 74%, 75%, 76%, 77%, 78%, 79%, 80%, 81%, 82%, 83%, 84%, 85%, 86%, 87%, 88%, 89%, 90%, 91%, 92%, 93%, 94%, 95%, 96%, 97%, 98%, or 99% sequence identity to the amino acid sequence represented by (any one of) SEQ ID NO: 2 or 4 and preferably conferring enhanced yield-related traits relative to or compared to control plants; or
   [0131] (vii) a nucleic acid comprising any combination(s) of features of (i) to (vi) above.
[0132] E. Method according to any embodiment A to D, wherein said enhanced yield-related traits comprise one or more of increased yield, preferably increase of (leafy) biomass, shorter time to flower, total root biomass, total seed yield, fillrate, harvest index, number of panicles in the first flush, number of filled seeds, height of the plant, taller more erect plants, amount of thick roots relative to or compared to control plants.
[0133] F. Method according to any one of embodiments A to E, wherein said enhanced yield-related traits are obtained under non-stress conditions.
[0134] G. Method according to any one of embodiments A to E, wherein said enhanced yield-related traits are obtained under drought stress.
[0135] H. Method according to any one of embodiments A to G, wherein said nucleic acid is operably linked to a constitutive promoter, preferably to a GOS2 promoter, most preferably to a GOS2 promoter from rice.
[0136] I. Method according to any one of embodiments A to H, wherein said nucleic acid molecule or said polypeptide, respectively, is of plant origin, preferably from a dicotyledonous plant, further preferably from the family Salicaceae, more preferably from the genus Populus, most preferably from Populus trichocarpa.
[0137] J. Plant or part thereof, including seeds, obtainable by a method according to any one of embodiments A to I, wherein said plant or part thereof comprises a recombinant nucleic acid encoding said polypeptide as defined in any one of embodiments A to I.
[0138] K. Construct comprising:
   [0139] (i) nucleic acid encoding said polypeptide as defined in any one of embodiments A to H;
   [0140] (ii) one or more control sequences capable of driving expression of the nucleic acid sequence of (a); and optionally
   [0141] (iii) a transcription termination sequence.
[0142] L. Construct according to embodiment K, wherein one of said control sequences is a constitutive promoter, preferably a GOS2 promoter, most preferably a GOS2 promoter from rice.
[0143] M. Use of a construct according to embodiment K or L in a method for making plants having increased yield, particularly seed yield and/or shoot biomass relative to control plants relative to control plants.
[0144] N. Plant, plant part or plant cell transformed with a construct according to embodiment K or L or obtainable by a method according to any one of embodiments A to I, wherein said plant or part thereof comprises a recombinant nucleic acid encoding said polypeptide as defined in any one of embodiments A to J.
[0145] O. Method for the production of a transgenic plant having increased yield, particularly increased biomass and/or increased seed yield relative to control plants, comprising:
   [0146] (i) introducing and expressing in a plant a nucleic acid encoding said polypeptide as defined in any one of embodiments A to H; and
   [0147] (ii) cultivating the plant cell under conditions promoting plant growth and development.
[0148] P. Plant having increased yield, particularly increased biomass and/or increased seed yield, relative to control plants, resulting from modulated expression of a nucleic acid encoding said polypeptide, or a transgenic plant cell originating from or being part of said transgenic plant.
[0149] Q. A method for the production of a product comprising the steps of growing the plants of the invention and producing said product from or by
   [0150] (a) the plants of the invention; or
   [0151] (b) parts, including seeds, of these plants.
[0152] R. Plant according to embodiment J, N, or P, or a transgenic plant cell originating thereof, or a method according to embodiment Q, wherein said plant is a crop plant, preferably a dicot such as sugar beet, alfalfa, trefoil, chicory, carrot, cassava, cotton, soybean, canola or a monocot, such as sugarcane, or a cereal, such as rice, maize, wheat, barley, millet, rye, triticale, sorghum emmer, spelt, secale, einkorn, teff, milo and oats.
[0153] S. Harvestable parts of a plant according to embodiment J, wherein said harvestable parts are preferably shoot and/or root biomass and/or seeds.
[0154] T. Products produced from a plant according to embodiment J and/or from harvestable parts of a plant according to embodiment R.
[0155] U. Use of a nucleic acid encoding a polypeptide as defined in any one of embodiments A to H in increasing yield, particularly seed yield and/or shoot biomass relative to control plants.
[0156] V. Construct according to embodiment K or L comprised in a plant cell.
[0157] W. Recombinant chromosomal DNA comprising the construct according to embodiment K or L.

[0158] With respect to calnexin-related polypeptides, the present invention moreover relates to the following specific embodiments 1 to 22:
[0159] 1. A method for enhancing yield in plants relative to or compared to control plants, comprising modulating expression in a plant of a nucleic acid molecule encoding a calnexin-related polypeptide, preferably comprising one or motifs selected from a group consisting of motif 4 to 6 as defined herein and/or comprising at least one Interpro domain IPR001580, Interpro domain IPR008985, Interpro domain IPR009033, Interpro domain IPR013320 or Interpro domain IPR018124.
[0160] 2. Method according to embodiment 1, wherein said modulated expression is effected by introducing and expressing in a plant a nucleic acid molecule encoding a calnexin-related polypeptide.
[0161] 3. Method according to embodiment 1 or 2, wherein said polypeptide is encoded by a nucleic acid molecule comprising a nucleic acid molecule selected from the group consisting of:
   [0162] (i) a nucleic acid represented by (any one of) SEQ ID NO: 80;
   [0163] (ii) the complement of a nucleic acid represented by (any one of) SEQ ID NO: 80;
   [0164] (iii) a nucleic acid encoding the polypeptide as represented by (any one of) SEQ ID NO: 80, preferably as a result of the degeneracy of the genetic code, said isolated nucleic acid can be deduced from a polypeptide sequence as represented by (any one of) SEQ ID NO: 81 and further preferably confers enhanced yield-related traits relative to or compared to control plants;
   [0165] (iv) a nucleic acid having, in increasing order of preference at least 30%, 31%, 32%, 33%, 34%, 35%, 36%, 37%, 38%, 39%, 40%, 41%, 42%, 43%, 44%, 45%, 46%, 47%, 48%, 49%, 50%, 51%, 52%, 53%, 54%, 55%, 56%, 57%, 58%, 59%, 60%, 61%, 62%, 63%, 64%, 65%, 66%, 67%, 68%, 69%, 70%, 71%, 72%, 73%, 74%, 75%, 76%, 77%, 78%, 79%, 80%, 81%, 82%, 83%, 84%, 85%, 86%, 87%, 88%, 89%, 90%, 91%, 92%, 93%, 94%, 95%, 96%, 97%, 98%, or 99% sequence identity with any of the nucleic acid sequences of SEQ ID NO: 80, and further preferably conferring enhanced yield-related traits relative to or compared to control plants, wherein the nucleic acid encodes a polypeptide that is not the polypeptide of any of the polypeptide sequence as represented by (any one of) SEQ ID NO: 81;
   [0166] (v) a first nucleic acid molecule which hybridizes with a second nucleic acid molecule of (i) to (iv) under stringent hybridization conditions and preferably confers enhanced yield-related traits relative to or compared to control plants, wherein the first nucleic acid encodes a polypeptide that is not the polypeptide of any of the polypeptide sequence as represented by (any one of) SEQ ID NO: 81;
   [0167] (vi) a nucleic acid encoding said polypeptide having, in increasing order of preference, at least 50%, 51%, 52%, 53%, 54%, 55%, 56%, 57%, 58%, 59%, 60%, 61%, 62%, 63%, 64%, 65%, 66%, 67%, 68%, 69%, 70%, 71%, 72%, 73%, 74%, 75%, 76%, 77%, 78%, 79%, 80%, 81%, 82%, 83%, 84%, 85%, 86%, 87%, 88%, 89%, 90%, 91%, 92%, 93%, 94%, 95%, 96%, 97%, 98%, or 99% sequence identity to the amino acid sequence represented by (any one of) SEQ ID NO: 81 and preferably conferring enhanced yield-related traits relative to or compared to control plants; or
   [0168] (vii) a nucleic acid comprising any combination(s) of features of (i) to (vi) above.
[0169] 4. Method according to any embodiment 1 to 3, wherein said enhanced yield-related traits comprise one or more of increased yield, preferably increase of total seed yield, fillrate, TKW, number of filled seeds, taller more erect plants, amount of thick roots, number of florets per panicle on a plant, increased harvest index, increased greenness of a plant before flowering, increased height of the plant, increased quick early development relative to or compared to control plants.
[0170] 5. Method according to any one of embodiments 1 to 4, wherein said enhanced yield-related traits are obtained under non-stress conditions.
[0171] 6. Method according to any one of embodiments 1 to 4, wherein said enhanced yield-related traits are obtained under conditions of drought stress, salt stress or nitrogen deficiency.
[0172] 7. Method according to any one of embodiments 1 to 5, wherein said nucleic acid is operably linked to a constitutive promoter, preferably to a GOS2 promoter, most preferably to a GOS2 promoter from rice.
[0173] 8. Method according to any one of embodiments 1 to 7, wherein said nucleic acid molecule or said polypeptide, respectively, is of plant origin, preferably from a dicotyledonous plant, more preferably from the family Salicaceae, more preferably from the genus Populus, most preferably the nucleic acid is from Populus trichocarpa.
[0174] 9. Plant or part thereof, including seeds, obtainable by a method according to any one of embodiments 1 to 8, wherein said plant or part thereof comprises a recombinant nucleic acid encoding said polypeptide as defined in any one of embodiments 1 to 8.
[0175] 10. Construct comprising:
   [0176] (a) nucleic acid encoding said polypeptide as defined in any one of embodiments 1 to 8;
   [0177] (b) one or more control sequences capable of driving expression of the nucleic acid sequence of (a); and optionally
   [0178] (c) a transcription termination sequence.
[0179] 11. Construct according to embodiment 10, wherein one of said control sequences is a constitutive promoter, preferably a GOS2 promoter, most preferably a GOS2 promoter from rice.
[0180] 12. Use of a construct according to embodiment 10 or 11 in a method for making plants having increased yield, particularly seed yield and/or shoot biomass relative to or compared to control plants relative to or compared to control plants.
[0181] 13. Plant, plant part or plant cell transformed with a construct according to embodiment 10 or 11 or obtainable by a method according to any one of embodiments 1 to 8, wherein said plant or part thereof comprises a recombinant nucleic acid encoding said polypeptide as defined in any one of embodiments 1 to 8.
[0182] 14. Method for the production of a transgenic plant having increased yield, particularly increased biomass and/or increased seed yield relative to or compared to control plants, comprising:
   [0183] (i) introducing and expressing in a plant a nucleic acid encoding said polypeptide as defined in any one of embodiments 1 to 8; and
   [0184] (ii) cultivating the plant cell under conditions promoting plant growth and development.
[0185] 15. Plant having increased yield, particularly increased biomass and/or increased seed yield, relative to or compared to control plants, resulting from modulated expression of a nucleic acid encoding said polypeptide, or a transgenic plant cell originating from or being part of said transgenic plant.
[0186] 16. A method for the production of a product comprising the steps of growing the plants of the invention and producing said product from or by
   [0187] (a) the plants of the invention; or
   [0188] (b) parts, including seeds, of these plants.
[0189] 17. Plant according to embodiment 9, 13 or 15 or a transgenic plant cell originating thereof, or a method according to embodiment claim 14 or 16, wherein said plant is a crop plant, preferably a dicot such as sugar beet, alfalfa, trefoil, chicory, carrot, cassava, cotton, soybean, canola or a monocot, such as sugarcane, or a cereal, such as rice, maize, wheat, barley, millet, rye, triticale, sorghum emmer, spelt, secale, einkorn, teff, milo and oats.
[0190] 18. Harvestable parts of a plant according to embodiment 9, 13 or 15 wherein said harvestable parts are preferably shoot and/or root biomass and/or seeds.
[0191] 19. Products produced from a plant according to embodiment 9, 13 or 15 and/or from harvestable parts of a plant according to embodiment 17.
[0192] 20. Use of a nucleic acid encoding a polypeptide as defined in any one of embodiments 1 to 8 in increasing yield, particularly seed yield and/or shoot biomass relative to or compared to control plants.
[0193] 21. Construct according to embodiment 10 or 11 comprised in a plant cell.
[0194] 22. Recombinant chromosomal DNA comprising the construct according to embodiment 10 or 11.

### DEFINITIONS

[0195] The following definitions will be used throughout the present application. The section captions and headings in this application are for convenience and reference purpose only and should not affect in any way the meaning or interpretation of this application. The technical terms and expressions used within the scope of this application are generally to be given the meaning commonly applied to them in the pertinent art of plant biology, molecular biology, bioinformatics and plant breeding. All of the following term definitions apply to the complete content of this application. The term “essentially”, “about”, “approximately” and the like in connection with an attribute or a value, particularly also define exactly the attribute or exactly the value, respectively. The term “about” in the context of a given numeric value or range relates in particular to a value or range that is within 20%, within 10%, or within 5% of the value or range given. As used herein, the term “comprising” also encompasses the term “consisting of”.

### Peptide(s)/Protein(s)

[0196] The terms “peptides”, “oligopeptides”, “polypeptide” and “protein” are used interchangeably herein and refer to amino acids in a polymeric form of any length, linked together by peptide bonds, unless mentioned herein otherwise.

### Polynucleotide(s)/Nucleic Acid(s)/Nucleic Acid Sequence(s)/Nucleotide Sequence(s)

[0197] The terms “polynucleotide(s)”, “nucleic acid sequence(s)”, “nucleotide sequence(s)”, “nucleic acid(s)”, “nucleic acid molecule” are used interchangeably herein and refer to nucleotides, either ribonucleotides or deoxyribonucleotides or a combination of both, in a polymeric unbranched form of any length.

### Homologue(s)

[0198] “Homologues” of a protein encompass peptides, oligopeptides, polypeptides, proteins and enzymes having amino acid substitutions, deletions and/or insertions relative to the unmodified protein in question and having similar biological and functional activity as the unmodified protein from which they are derived.

[0199] Orthologues and paralogues are two different forms of homologues and encompass evolutionary concepts used to describe the ancestral relationships of genes. Paralogues are genes within the same species that have originated through duplication of an ancestral gene; orthologues are genes from different organisms that have originated through speciation, and are also derived from a common ancestral gene.

[0200] A “deletion” refers to removal of one or more amino acids from a protein.

[0201] An “insertion” refers to one or more amino acid residues being introduced into a predetermined site in a protein. Insertions may comprise N-terminal and/or C-terminal fusions as well as intra-sequence insertions of single or multiple amino acids. Generally, insertions within the amino acid sequence will be smaller than N- or C-terminal fusions, of the order of about 1 to 10 residues. Examples of N- or C-terminal fusion proteins or peptides include the binding domain or activation domain of a transcriptional activator as used in the yeast two-hybrid system, phage coat proteins, (histidine)-6-tag, glutathione S-transferase-tag, protein A, maltose-binding protein, dihydrofolate reductase, Tag•100 epitope, c-myc epitope, FLAG®-epitope, lacZ, CMP (calmodulin-binding peptide), HA epitope, protein C epitope and VSV epitope.

[0202] A “substitution” refers to replacement of amino acids of the protein with other amino acids having similar properties (such as similar hydrophobicity, hydrophilicity, antigenicity, propensity to form or break α-helical structures or β-sheet structures). Amino acid substitutions are typically of single residues, but may be clustered depending upon functional constraints placed upon the polypeptide and may range from 1 to 10 amino acids. The amino acid substitutions are preferably conservative amino acid substitutions. Conservative substitution tables are well known in the art (see for example Creighton (1984) Proteins. W.H. Freeman and Company (Eds) and Table 1 below).

TABLE 1
Examples of conserved amino acid substitutions

| Residue | Conservative Substitutions |
|---|---|
| Ala | Ser |
| Arg | Lys |
| Asn | Gln; His |
| Asp | Glu |
| Gln | Asn |
| Cys | Ser |
| Glu | Asp |
| Gly | Pro |
| His | Asn; Gln |
| Ile | Leu, Val |
| Leu | Ile; Val |
| Lys | Arg; Gln |
| Met | Leu; Ile |
| Phe | Met; Leu; Tyr |
| Ser | Thr; Gly |
| Thr | Ser; Val |
| Trp | Tyr |
| Tyr | Trp; Phe |
| Val | Ile; Leu |

[0203] Amino acid substitutions, deletions and/or insertions may readily be made using peptide synthetic techniques known in the art, such as solid phase peptide synthesis and the like, or by recombinant DNA manipulation. Methods for the manipulation of DNA sequences to produce substitution, insertion or deletion variants of a protein are well known in the art. For example, techniques for making substitution mutations at predetermined sites in DNA are well known to those skilled in the art and include M13 mutagenesis, T7-Gen in vitro mutagenesis (USB, Cleveland, Ohio), QuickChange Site Directed mutagenesis (Stratagene, San Diego, Calif.), PCR-mediated site-directed mutagenesis or other site-directed mutagenesis protocols (see Current Protocols in Molecular Biology, John Wiley & Sons, N.Y. (1989 and yearly updates)).

### Derivatives

[0204] “Derivatives” include peptides, oligopeptides, polypeptides which may, compared to the amino acid sequence of the naturally-occurring form of the protein, such as the protein of interest, comprise substitutions of amino acids with non-naturally occurring amino acid residues, or additions of non-naturally occurring amino acid residues. “Derivatives” of a protein also encompass peptides, oligopeptides, polypeptides which comprise naturally occurring altered (glycosylated, acylated, prenylated, phosphorylated, myristoylated, sulphated etc.) or non-naturally altered amino acid residues compared to the amino acid sequence of a naturally-occurring form of the polypeptide. A derivative may also comprise one or more non-amino acid substituents or additions compared to the amino acid sequence from which it is derived, for example a reporter molecule or other ligand, covalently or non-covalently bound to the amino acid sequence, such as a reporter molecule which is bound to facilitate its detection, and non-naturally occurring amino acid residues relative to the amino acid sequence of a naturally-occurring protein. Furthermore, “derivatives” also include fusions of the naturally-occurring form of the protein with tagging peptides such as FLAG, HIS6 or thioredoxin (for a review of tagging peptides, see Terpe, Appl. Microbiol. Biotechnol. 60, 523-533, 2003).

### Domain, Motif/Consensus Sequence/Signature

[0205] The term “domain” refers to a set of amino acids conserved at specific positions along an alignment of sequences of evolutionarily related proteins. While amino acids at other positions can vary between homologues, amino acids that are highly conserved at specific positions indicate amino acids that are likely essential in the structure, stability or function of a protein. Identified by their high degree of conservation in aligned sequences of a family of protein homologues, they can be used as identifiers to determine if any polypeptide in question belongs to a previously identified polypeptide family.

[0206] The term “motif” or “consensus sequence” or “signature” refers to a short conserved region in the sequence of evolutionarily related proteins. Motifs are frequently highly conserved parts of domains, but may also include only part of the domain, or be located outside of conserved domain (if all of the amino acids of the motif fall outside of a defined domain).

[0207] Specialist databases exist for the identification of domains, for example, SMART (Schultz et al. (1998) Proc. Natl. Acad. Sci. USA 95, 5857-5864; Letunic et al. (2002) Nucleic Acids Res 30, 242-244), InterPro (Mulder et al., (2003) Nucl. Acids. Res. 31, 315-318), Prosite (Bucher and Bairoch (1994), A generalized profile syntax for biomolecular sequences motifs and its function in automatic sequence interpretation. (In) ISMB-94; Proceedings 2nd International Conference on Intelligent Systems for Molecular Biology. Altman R., Brutlag D., Karp P., Lathrop R., Searls D., Eds., pp 53-61, AAAI Press, Menlo Park; Hulo et al., Nucl. Acids. Res. 32:D134-D137, (2004)), or Pfam (Bateman et al., Nucleic Acids Research 30(1): 276-280 (2002)). The Pfam protein families database: R. D. Finn, J. Mistry, J. Tate, P. Coggill, A. Heger, J. E. Pollington, O. L. Gavin, P. Gunesekaran, G. Ceric, K. Forslund, L. Holm, E. L. Sonnhammer, S. R. Eddy, A. Bateman Nucleic Acids Research (2010) Database Issue 38:211-222). A set of tools for in silico analysis of protein sequences is available on the ExPASy proteomics server (Swiss Institute of Bioinformatics (Gasteiger et al., ExPASy: the proteomics server for in-depth protein knowledge and analysis, Nucleic Acids Res. 31:3784-3788(2003)). Domains or motifs may also be identified using routine techniques, such as by sequence alignment.

[0208] Methods for the alignment of sequences for comparison are well known in the art, such methods include GAP, BESTFIT, BLAST, FASTA and TFASTA. GAP uses the algorithm of Needleman and Wunsch ((1970) J Mol Biol 48: 443-453) to find the global (i.e. spanning the complete sequences) alignment of two sequences that maximizes the number of matches and minimizes the number of gaps. The BLAST algorithm (Altschul et al. (1990) J Mol Biol 215: 403-10) calculates percent sequence identity and performs a statistical analysis of the similarity between the two sequences. The software for performing BLAST analysis is publicly available through the National Centre for Biotechnology Information (NCBI). Homologues may readily be identified using, for example, the ClustalW multiple sequence alignment algorithm (version 1.83), with the default pairwise alignment parameters, and a scoring method in percentage. Global percentages of similarity and identity may also be determined using one of the methods available in the MatGAT software package (Campanella et al., BMC Bioinformatics. 2003 Jul. 10; 4:29. MatGAT: an application that generates similarity/identity matrices using protein or DNA sequences.). Minor manual editing may be performed to optimise alignment between conserved motifs, as would be apparent to a person skilled in the art. Furthermore, instead of using full-length sequences for the identification of homologues, specific domains may also be used. The sequence identity values may be determined over the entire nucleic acid or amino acid sequence or over selected domains or conserved motif(s), using the programs mentioned above using the default parameters. For local alignments, the Smith-Waterman algorithm is particularly useful (Smith T F, Waterman M S (1981) J. Mol. Biol 147(1); 195-7).

### Reciprocal BLAST

[0209] Typically, this involves a first BLAST involving BLASTing a query sequence (for example using any of the sequences listed in Table A of the Examples section) against any sequence database, such as the publicly available NCBI database. BLASTN or TBLASTX (using standard default values) are generally used when starting from a nucleotide sequence, and BLASTP or TBLASTN (using standard default values) when starting from a protein sequence. The BLAST results may optionally be filtered. The full-length sequences of either the filtered results or non-filtered results are then BLASTed back (second BLAST) against sequences from the organism from which the query sequence is derived. The results of the first and second BLASTs are then compared. A paralogue is identified if a high-ranking hit from the first blast is from the same species as from which the query sequence is derived, a BLAST back then ideally results in the query sequence amongst the highest hits; an orthologue is identified if a high-ranking hit in the first BLAST is not from the same species as from which the query sequence is derived, and preferably results upon BLAST back in the query sequence being among the highest hits.

[0210] High-ranking hits are those having a low E-value. The lower the E-value, the more significant the score (or in other words the lower the chance that the hit was found by chance). Computation of the E-value is well known in the art. In addition to E-values, comparisons are also scored by percentage identity. Percentage identity refers to the number of identical nucleotides (or amino acids) between the two compared nucleic acid (or polypeptide) sequences over a particular length. In the case of large families, ClustalW may be used, followed by a neighbour joining tree, to help visualize clustering of related genes and to identify orthologues and paralogues.

### Hybridisation

[0211] The term “hybridisation” as defined herein is a process wherein substantially homologous complementary nucleotide sequences anneal to each other. The hybridisation process can occur entirely in solution, i.e. both complementary nucleic acids are in solution. The hybridisation process can also occur with one of the complementary nucleic acids immobilised to a matrix such as magnetic beads, Sepharose beads or any other resin. The hybridisation process can furthermore occur with one of the complementary nucleic acids immobilised to a solid support such as a nitro-cellulose or nylon membrane or immobilised by e.g. photolithography to, for example, a siliceous glass support (the latter known as nucleic acid arrays or microarrays or as nucleic acid chips). In order to allow hybridisation to occur, the nucleic acid molecules are generally thermally or chemically denatured to melt a double strand into two single strands and/or to remove hairpins or other secondary structures from single stranded nucleic acids.

[0212] The term “stringency” refers to the conditions under which a hybridisation takes place. The stringency of hybridisation is influenced by conditions such as temperature, salt concentration, ionic strength and hybridisation buffer composition. Generally, low stringency conditions are selected to be about 30° C. lower than the thermal melting point (Tₘ) for the specific sequence at a defined ionic strength and pH. Medium stringency conditions are when the temperature is 20° C. below Tₘ, and high stringency conditions are when the temperature is 10° C. below Tₘ. High stringency hybridisation conditions are typically used for isolating hybridising sequences that have high sequence similarity to the target nucleic acid sequence. However, nucleic acids may deviate in sequence and still encode a substantially identical polypeptide, due to the degeneracy of the genetic code. Therefore medium stringency hybridisation conditions may sometimes be needed to identify such nucleic acid molecules.

[0213] The Tₘ is the temperature under defined ionic strength and pH, at which 50% of the target sequence hybridises to a perfectly matched probe. The Tₘ is dependent upon the solution conditions and the base composition and length of the probe. For example, longer sequences hybridise specifically at higher temperatures. The maximum rate of hybridisation is obtained from about 16° C. up to 32° C. below Tₘ. The presence of monovalent cations in the hybridisation solution reduce the electrostatic repulsion between the two nucleic acid strands thereby promoting hybrid formation; this effect is visible for sodium concentrations of up to 0.4M (for higher concentrations, this effect may be ignored). Formamide reduces the melting temperature of DNA-DNA and DNA-RNA duplexes with 0.6 to 0.7° C. for each percent formamide, and addition of 50% formamide allows hybridisation to be performed at 30 to 45° C., though the rate of hybridisation will be lowered. Base pair mismatches reduce the hybridisation rate and the thermal stability of the duplexes. On average and for large probes, the Tm decreases about 1° C. per % base mismatch. The Tₘ may be calculated using the following equations, depending on the types of hybrids:

1) DNA-DNA hybrids (Meinkoth and Wahl, Anal. Biochem., 138: 267-284, 1984):

Tₘ=81.5° C.+16.6×log₁₀[Na⁺]^{a}+0.41x%[G/C^{b}]−500x[L^{c}]⁻¹−0.61x% formamide

2) DNA-RNA or RNA-RNA hybrids:

Tₘ=79.8° C.+18.5(log₁₀[Na⁺]^{a})+0.58(% G/C^{b})+11.8(% G/C^{b})²−820/L^{c}

3) oligo-DNA or oligo-RNAs hybrids:
[0214] For <20 nucleotides: Tₘ=2 (Iₙ)
[0215] For 20-35 nucleotides: Tₘ=22+1.46 (In)
   ^{a} or for other monovalent cation, but only accurate in the 0.01-0.4 M range.
   ^{b} only accurate for % GC in the 30% to 75% range.
   ^{c} L=length of duplex in base pairs.
   ^{d} oligo, oligonucleotide; Iₙ, =effective length of primer=2×(no. of G/C)+(no. of A/T).

[0216] Non-specific binding may be controlled using any one of a number of known techniques such as, for example, blocking the membrane with protein containing solutions, additions of heterologous RNA, DNA, and SDS to the hybridisation buffer, and treatment with Rnase. For non-homologous probes, a series of hybridizations may be performed by varying one of (i) progressively lowering the annealing temperature (for example from 68° C. to 42° C.) or (ii) progressively lowering the formamide concentration (for example from 50% to 0%). The skilled artisan is aware of various parameters which may be altered during hybridisation and which will either maintain or change the stringency conditions.

[0217] Besides the hybridisation conditions, specificity of hybridisation typically also depends on the function of post-hybridisation washes. To remove background resulting from non-specific hybridisation, samples are washed with dilute salt solutions. Critical factors of such washes include the ionic strength and temperature of the final wash solution: the lower the salt concentration and the higher the wash temperature, the higher the stringency of the wash. Wash conditions are typically performed at or below hybridisation stringency. A positive hybridisation gives a signal that is at least twice of that of the background. Generally, suitable stringent conditions for nucleic acid hybridisation assays or gene amplification detection procedures are as set forth above. More or less stringent conditions may also be selected. The skilled artisan is aware of various parameters which may be altered during washing and which will either maintain or change the stringency conditions.

[0218] For example, typical high stringency hybridisation conditions for DNA hybrids longer than 50 nucleotides encompass hybridisation at 65° C. in 1×SSC or at 42° C. in 1×SSC and 50% formamide, followed by washing at 65° C. in 0.3×SSC. Examples of medium stringency hybridisation conditions for DNA hybrids longer than 50 nucleotides encompass hybridisation at 50° C. in 4×SSC or at 40° C. in 6×SSC and 50% formamide, followed by washing at 50° C. in 2×SSC. The length of the hybrid is the anticipated length for the hybridising nucleic acid. When nucleic acids of known sequence are hybridised, the hybrid length may be determined by aligning the sequences and identifying the conserved regions described herein. 1×SSC is 0.15M NaCl and 15 mM sodium citrate; the hybridisation solution and wash solutions may additionally include 5×Denhardt's reagent, 0.5-1.0% SDS, 100 μg/ml denatured, fragmented salmon sperm DNA, 0.5% sodium pyrophosphate.

[0219] For the purposes of defining the level of stringency, reference can be made to Sambrook et al. (2001) Molecular Cloning: a laboratory manual, 3^{rd} Edition, Cold Spring Harbor Laboratory Press, CSH, New York or to Current Protocols in Molecular Biology, John Wiley & Sons, N.Y. (1989 and yearly updates).

### Splice Variant

[0220] The term “splice variant” as used herein encompasses variants of a nucleic acid sequence in which selected introns and/or exons have been excised, replaced, displaced or added, or in which introns have been shortened or lengthened. Such variants will be ones in which the biological activity of the protein is substantially retained; this may be achieved by selectively retaining functional segments of the protein. Such splice variants may be found in nature or may be manmade. Methods for predicting and isolating such splice variants are well known in the art (see for example Foissac and Schiex (2005) BMC Bioinformatics 6: 25).

### Allelic Variant

[0221] “Alleles” or “allelic variants” are alternative forms of a given gene, located at the same chromosomal position. Allelic variants encompass Single Nucleotide Polymorphisms (SNPs), as well as Small Insertion/Deletion Polymorphisms (INDELs). The size of INDELs is usually less than 100 bp. SNPs and INDELs form the largest set of sequence variants in naturally occurring polymorphic strains of most organisms.

### Endogenous Gene

[0222] Reference herein to an “endogenous” gene not only refers to the gene in question as found in a plant in its natural form (i.e., without there being any human intervention), but also refers to that same gene (or a substantially homologous nucleic acid/gene) in an isolated form subsequently (re)introduced into a plant (a transgene). For example, a transgenic plant containing such a transgene may encounter a substantial reduction of the transgene expression and/or substantial reduction of expression of the endogenous gene. The isolated gene may be isolated from an organism or may be manmade, for example by chemical synthesis.

### Gene Shuffling/Directed Evolution

[0223] “Gene shuffling” or “directed evolution” consists of iterations of DNA shuffling followed by appropriate screening and/or selection to generate variants of nucleic acids or portions thereof encoding proteins having a modified biological activity (Castle et al., (2004) Science 304(5674): 1151-4; U.S. Pat. Nos. 5,811,238 and 6,395,547).

### Construct

[0224] Artificial DNA (such as but, not limited to plasmids or viral DNA) capable of replication in a host cell and used for introduction of a DNA sequence of interest into a host cell or host organism. Host cells of the invention may be any cell selected from bacterial cells, such as Escherichia coli or Agrobacterium species cells, yeast cells, fungal, algal or cyanobacterial cells or plant cells. The skilled artisan is well aware of the genetic elements that must be present on the genetic construct in order to successfully transform, select and propagate host cells containing the sequence of interest. The sequence of interest is operably linked to one or more control sequences (at least to a promoter) as described herein. Additional regulatory elements may include transcriptional as well as translational enhancers. Those skilled in the art will be aware of terminator and enhancer sequences that may be suitable for use in performing the invention. An intron sequence may also be added to the 5′ untranslated region (UTR) or in the coding sequence to increase the amount of the mature message that accumulates in the cytosol, as described in the definitions section. Other control sequences (besides promoter, enhancer, silencer, intron sequences, 3′UTR and/or 5′UTR regions) may be protein and/or RNA stabilizing elements. Such sequences would be known or may readily be obtained by a person skilled in the art.

[0225] The genetic constructs of the invention may further include an origin of replication sequence that is required for maintenance and/or replication in a specific cell type. One example is when a genetic construct is required to be maintained in a bacterial cell as an episomal genetic element (e.g. plasmid or cosmid molecule). Preferred origins of replication include, but are not limited to, the f1-ori and colE1.

[0226] For the detection of the successful transfer of the nucleic acid sequences as used in the methods of the invention and/or selection of transgenic plants comprising these nucleic acids, it is advantageous to use marker genes (or reporter genes). Therefore, the genetic construct may optionally comprise a selectable marker gene. Selectable markers are described in more detail in the “definitions” section herein. The marker genes may be removed or excised from the transgenic cell once they are no longer needed. Techniques for marker removal are known in the art, useful techniques are described above in the definitions section.

### Regulatory Element/Control Sequence/Promoter

[0227] The terms “regulatory element”, “control sequence” and “promoter” are all used interchangeably herein and are to be taken in a broad context to refer to regulatory nucleic acid sequences capable of effecting expression of the sequences to which they are ligated. The term “promoter” typically refers to a nucleic acid control sequence located upstream from the transcriptional start of a gene and which is involved in recognising and binding of RNA polymerase and other proteins, thereby directing transcription of an operably linked nucleic acid. Encompassed by the aforementioned terms are transcriptional regulatory sequences derived from a classical eukaryotic genomic gene (including the TATA box which is required for accurate transcription initiation, with or without a CCAAT box sequence) and additional regulatory elements (i.e. upstream activating sequences, enhancers and silencers) which alter gene expression in response to developmental and/or external stimuli, or in a tissue-specific manner. Also included within the term is a transcriptional regulatory sequence of a classical prokaryotic gene, in which case it may include a −35 box sequence and/or −10 box transcriptional regulatory sequences. The term “regulatory element” also encompasses a synthetic fusion molecule or derivative that confers, activates or enhances expression of a nucleic acid molecule in a cell, tissue or organ.

[0228] A “plant promoter” comprises regulatory elements, which mediate the expression of a coding sequence segment in plant cells. Accordingly, a plant promoter need not be of plant origin, but may originate from viruses or micro-organisms, for example from viruses which attack plant cells. The “plant promoter” can also originate from a plant cell, e.g. from the plant which is transformed with the nucleic acid sequence to be expressed in the inventive process and described herein. This also applies to other “plant” regulatory signals, such as “plant” terminators. The promoters upstream of the nucleotide sequences useful in the methods of the present invention can be modified by one or more nucleotide substitution(s), insertion(s) and/or deletion(s) without interfering with the functionality or activity of either the promoters, the open reading frame (ORF) or the 3′-regulatory region such as terminators or other 3′ regulatory regions which are located away from the ORF. It is furthermore possible that the activity of the promoters is increased by modification of their sequence, or that they are replaced completely by more active promoters, even promoters from heterologous organisms. For expression in plants, the nucleic acid molecule must, as described above, be linked operably to or comprise a suitable promoter which expresses the gene at the right point in time and with the required spatial expression pattern.

[0229] For the identification of functionally equivalent promoters, the promoter strength and/or expression pattern of a candidate promoter may be analysed for example by operably linking the promoter to a reporter gene and assaying the expression level and pattern of the reporter gene in various tissues of the plant. Suitable well-known reporter genes include for example beta-glucuronidase or beta-galactosidase. The promoter activity is assayed by measuring the enzymatic activity of the beta-glucuronidase or beta-galactosidase. The promoter strength and/or expression pattern may then be compared to that of a reference promoter (such as the one used in the methods of the present invention). Alternatively, promoter strength may be assayed by quantifying mRNA levels or by comparing mRNA levels of the nucleic acid used in the methods of the present invention, with mRNA levels of housekeeping genes such as 18S rRNA, using methods known in the art, such as Northern blotting with densitometric analysis of autoradiograms, quantitative real-time PCR or RT-PCR (Heid et al., 1996 Genome Methods 6: 986-994). Generally by “weak promoter” is intended a promoter that drives expression of a coding sequence at a low level. By “low level” is intended at levels of about 1/10,000 transcripts to about 1/100,000 transcripts, to about 1/500,0000 transcripts per cell. Conversely, a “strong promoter” drives expression of a coding sequence at high level, or at about 1/10 transcripts to about 1/100 transcripts to about 1/1000 transcripts per cell. Generally, by “medium strength promoter” is intended a promoter that drives expression of a coding sequence at a lower level than a strong promoter, in particular at a level that is in all instances below that obtained when under the control of a 35S CaMV promoter.

### Operably Linked

[0230] The term “operably linked” as used herein refers to a functional linkage between the promoter sequence and the gene of interest, such that the promoter sequence is able to initiate transcription of the gene of interest.

### Constitutive Promoter

[0231] A “constitutive promoter” refers to a promoter that is transcriptionally active during most, but not necessarily all, phases of growth and development and under most environmental conditions, in at least one cell, tissue or organ. Table 2a below gives examples of constitutive promoters.

TABLE 2a
Examples of constitutive promoters

| Gene Source | Reference |
|---|---|
| Actin | McElroy et al, Plant Cell, 2: 163-171, 1990 |
| HMGP | WO 2004/070039 |
| CAMV 35S | Odell et al, Nature, 313: 810-812, 1985 |
| CaMV 19S | Nilsson et al., Physiol. Plant. 100: 456-462, 1997 |
| GOS2 | de Pater et al, Plant J Nov; 2(6): 837-44, 1992, |
| | WO 2004/065596 |
| Ubiquitin | Christensen et al, Plant Mol. Biol. 18: 675-689, 1992 |
| Rice cyclophilin | Buchholz et al, Plant Mol Biol. 25(5): 837-43, 1994 |
| Maize H3 histone | Lepetit et al, Mol. Gen. Genet. 231: 276-285, 1992 |
| Alfalfa H3 | Wu et al. Plant Mol. Biol. 11: 641-649, 1988 |
| histone | |
| Actin 2 | An et al, Plant J. 10(1); 107-121, 1996 |
| 34S FMV | Sanger et al., Plant. Mol. Biol., 14, 1990: 433-443 |
| Rubisco small | U.S. Pat. No. 4,962,028 |
| subunit | |
| OCS | Leisner (1988) Proc Natl Acad Sci USA 85(5): 2553 |
| SAD1 | Jain et al., Crop Science, 39 (6), 1999: 1696 |
| SAD2 | Jain et al., Crop Science, 39 (6), 1999: 1696 |
| nos | Shaw et al. (1984) Nucleic Acids Res. 12(20): |
| | 7831-7846 |
| V-ATPase | WO 01/14572 |
| Super promoter | WO 95/14098 |
| G-box proteins | WO 94/12015 |

### Ubiquitous Promoter

[0232] A “ubiquitous promoter” is active in substantially all tissues or cells of an organism.

### Developmentally-Regulated Promoter

[0233] A “developmentally-regulated promoter” is active during certain developmental stages or in parts of the plant that undergo developmental changes.

### Inducible Promoter

[0234] An “inducible promoter” has induced or increased transcription initiation in response to a chemical (for a review see Gatz 1997, Annu. Rev. Plant Physiol. Plant Mol. Biol., 48:89-108), environmental or physical stimulus, or may be “stress-inducible”, i.e. activated when a plant is exposed to various stress conditions, or a “pathogen-inducible” i.e. activated when a plant is exposed to exposure to various pathogens.

### Organ-Specific/Tissue-Specific Promoter

[0235] An “organ-specific” or “tissue-specific promoter” is one that is capable of preferentially initiating transcription in certain organs or tissues, such as the leaves, roots, seed tissue etc. For example, a “root-specific promoter” is a promoter that is transcriptionally active predominantly in plant roots, substantially to the exclusion of any other parts of a plant, whilst still allowing for any leaky expression in these other plant parts. Promoters able to initiate transcription in certain cells only are referred to herein as “cell-specific”.

[0236] Examples of root-specific promoters are listed in Table 2b below:

TABLE 2b
Examples of root-specific promoters

| Gene Source | Reference |
|---|---|
| RCc3 | Plant Mol Biol. 1995 January; 27(2): 237-48 |
| Arabidopsis PHT1 | Koyama et al. J Biosci Bioeng. 2005 January; |
| | 99(1): 38-42.; Mudge et al. (2002, Plant J. |
| | 31: 341) |
| Medicago phosphate | Xiao et al., 2006, Plant Biol (Stuttg). 2006 July; |
| transporter | 8(4): 439-49 |
| Arabidopsis Pyk10 | Nitz et al. (2001) Plant Sci 161(2): 337-346 |
| root-expressible genes | Tingey et al., EMBO J. 6: 1, 1987. |
| tobacco auxin- | Van der Zaal et al., Plant Mol. Biol. 16, |
| inducible gene | 983, 1991. |
| β-tubulin | Oppenheimer, et al., Gene 63: 87, 1988. |
| tobacco root- | Conkling, et al., Plant Physiol. 93: 1203, 1990. |
| specific genes | |
| B. napus G1-3b gene | U.S. Pat. No. 5,401,836 |
| SbPRP1 | Suzuki et al., Plant Mol. Biol. 21: 109-119, |
| | 1993. |
| LRX1 | Baumberger et al. 2001, Genes & Dev. 15: 1128 |
| BTG-26 Brassica | US 20050044585 |
| napus | |
| LeAMT1 (tomato) | Lauter et al. (1996, PNAS 3: 8139) |
| The LeNRT1-1 | Lauter et al. (1996, PNAS 3: 8139) |
| (tomato) | |
| class I patatin | Liu et al., Plant Mol. Biol. 17 (6): 1139-1154 |
| gene (potato) | |
| KDC1 (Daucus | Downey et al. (2000, J. Biol. Chem. 275: 39420) |
| carota) | |
| TobRB7 gene | W Song (1997) PhD Thesis, North Carolina State |
| | University, Raleigh, NC USA |
| OsRAB5a (rice) | Wang et al. 2002, Plant Sci. 163: 273 |
| ALF5 (Arabidopsis) | Diener et al. (2001, Plant Cell 13: 1625) |
| NRT2; 1Np (N. | Quesada et al. (1997, Plant Mol. Biol. 34: 265) |
| plumbaginifolia) | |

[0237] A “seed-specific promoter” is transcriptionally active predominantly in seed tissue, but not necessarily exclusively in seed tissue (in cases of leaky expression). The seed-specific promoter may be active during seed development and/or during germination. The seed specific promoter may be endosperm/aleurone/embryo specific. Examples of seed-specific promoters (endosperm/aleurone/embryo specific) are shown in Table 2c to Table 2f below. Further examples of seed-specific promoters are given in Qing Qu and Takaiwa (Plant Biotechnol. J. 2, 113-125, 2004), which disclosure is incorporated by reference herein as if fully set forth.

TABLE 2c
Examples of seed-specific promoters

| Gene source | Reference |
|---|---|
| seed-specific genes | Simon et al., Plant Mol. Biol. 5: 191, 1985; |
| | Scofield et al., J. Biol. Chem. 262: 12202, 1987.; |
| | Baszczynski et al., Plant Mol. Biol. 14: 633, 1990. |
| Brazil Nut albumin | Pearson et al., Plant Mol. Biol. 18: 235-245, 1992. |
| legumin | Ellis et al., Plant Mol. Biol. 10: 203-214, 1988. |
| glutelin (rice) | Takaiwa et al., Mol. Gen. Genet. 208: 15-22, 1986; |
| | Takaiwa et al., FEBS Letts. 221: 43-47, 1987. |
| zein | Matzke et al Plant Mol Biol, 14(3): 323-32 1990 |
| napA | Stalberg et al, Planta 199: 515-519, 1996. |
| wheat LMW and HMW | Mol Gen Genet 216: 81-90, 1989; NAR 17: 461-2, 1989 |
| glutenin-1 | |
| wheat SPA | Albani et al, Plant Cell, 9: 171-184, 1997 |
| wheat α, β, γ-gliadins | EMBO J. 3: 1409-15, 1984 |
| barley Itr1 promoter | Diaz et al. (1995) Mol Gen Genet 248(5): 592-8 |
| barley B1, C, D, hordein | Theor Appl Gen 98: 1253-62, 1999; Plant J 4: 343-55, |
| | 1993; Mol Gen Genet 250: 750-60, 1996 |
| barley DOF | Mena et al, The Plant Journal, 116(1): 53-62, 1998 |
| blz2 | EP99106056.7 |
| synthetic promoter | Vicente-Carbajosa et al., Plant J. 13: 629-640, 1998. |
| rice prolamin NRP33 | Wu et al, Plant Cell Physiology 39(8) 885-889, 1998 |
| rice a-globulin Glb-1 | Wu et al, Plant Cell Physiology 39(8) 885-889, 1998 |
| rice OSH1 | Sato et al, Proc. Natl. Acad. Sci. USA, 93: 8117-8122, |
| | 1996 |
| rice α-globulin REB/OHP-1 | Nakase et al. Plant Mol. Biol. 33: 513-522, 1997 |
| rice ADP-glucose pyrophos- | Trans Res 6: 157-68, 1997 |
| phorylase | |
| maize ESR gene family | Plant J 12: 235-46, 1997 |
| sorghum α-kafirin | DeRose et al., Plant Mol. Biol 32: 1029-35, 1996 |
| KNOX | Postma-Haarsma et al, Plant Mol. Biol. 39: 257-71, 1999 |
| rice oleosin | Wu et al, J. Biochem. 123: 386, 1998 |
| sunflower oleosin | Cummins et al., Plant Mol. Biol. 19: 873-876, 1992 |
| PRO0117, putative rice 40S | WO 2004/070039 |
| ribosomal protein | |
| PRO0136, rice alanine | unpublished |
| aminotransferase | |
| PRO0147, trypsin inhibitor | unpublished |
| ITR1 (barley) | |
| PRO0151, rice WSI18 | WO 2004/070039 |
| PRO0175, rice RAB21 | WO 2004/070039 |
| PRO005 | WO 2004/070039 |
| PRO0095 | WO 2004/070039 |
| α-amylase (Amy32b) | Lanahan et al, Plant Cell 4: 203-211, 1992; Skriver et al, |
| | Proc Natl Acad Sci USA 88: 7266-7270, 1991 |
| cathepsin β-like gene | Cejudo et al, Plant Mol Biol 20: 849-856, 1992 |
| Barley Ltp2 | Kalla et al., Plant J. 6: 849-60, 1994 |
| Chi26 | Leah et al., Plant J. 4: 579-89, 1994 |
| Maize B-Peru | Selinger et al., Genetics 149; 1125-38, 1998 |

TABLE 2d
examples of endosperm-specific promoters

| Gene source | Reference |
|---|---|
| glutelin (rice) | Takaiwa et al. (1986) Mol Gen Genet 208: 15-22; |
| | Takaiwa et al. (1987) FEBS Letts. 221: 43-47 |
| zein | Matzke et al., (1990) Plant Mol Biol 14(3): 323-32 |
| wheat LMW | Colot et al. (1989) Mol Gen Genet 216: 81-90, |
| and HMW | Anderson et al. (1989) NAR 17: 461-2 |
| glutenin-1 | |
| wheat SPA | Albani et al. (1997) Plant Cell 9: 171-184 |
| wheat gliadins | Rafalski et al. (1984) EMBO 3: 1409-15 |
| barley Itr1 | Diaz et al. (1995) Mol Gen Genet 248(5): 592-8 |
| promoter | |
| barley B1, C, D, | Cho et al. (1999) Theor Appl Genet 98: 1253-62; |
| hordein | Muller et al. (1993) Plant J 4: 343-55; |
| | Sorenson et al. (1996) Mol Gen Genet 250: 750-60 |
| barley DOF | Mena et al, (1998) Plant J 116(1): 53-62 |
| blz2 | Onate et al. (1999) J Biol Chem 274(14): 9175-82 |
| synthetic promoter | Vicente-Carbajosa et al. (1998) Plant J 13: 629-640 |
| rice prolamin | Wu et al, (1998) Plant Cell Physiol 39(8) 885-889 |
| NRP33 | |
| rice globulin | Wu et al. (1998) Plant Cell Physiol 39(8) 885-889 |
| Glb-1 | |
| rice globulin | Nakase et al. (1997) Plant Molec Biol 33: 513-522 |
| REB/OHP-1 | |
| rice ADP-glucose | Russell et al. (1997) Trans Res 6: 157-68 |
| pyrophosphorylase | |
| maize ESR | Opsahl-Ferstad et al. (1997) Plant J 12: 235-46 |
| gene family | |
| sorghum kafirin | DeRose et al. (1996) Plant Mol Biol 32: 1029-35 |

TABLE 2e
Examples of embryo specific promoters:

| Gene source | Reference |
|---|---|
| rice OSH1 | Sato et al, Proc. Natl. Acad. Sci. USA, 93: 8117-8122, |
| | 1996 |
| KNOX | Postma-Haarsma et al, Plant Mol. Biol. 39: 257-71, 1999 |
| PRO0151 | WO 2004/070039 |
| PRO0175 | WO 2004/070039 |
| PRO005 | WO 2004/070039 |
| PRO0095 | WO 2004/070039 |

TABLE 2f
Examples of aleurone-specific promoters:

| Gene source | Reference |
|---|---|
| α-amylase | Lanahan et al, Plant Cell 4: 203-211, 1992; |
| (Amy32b) | Skriver et al, Proc Natl Acad Sci USA 88: |
| | 7266-7270, 1991 |
| cathepsin β-like gene | Cejudo et al, Plant Mol Biol 20: 849-856, 1992 |
| Barley Ltp2 | Kalla et al., Plant J. 6: 849-60, 1994 |
| Chi26 | Leah et al., Plant J. 4: 579-89, 1994 |
| Maize B-Peru | Selinger et al., Genetics 149; 1125-38, 1998 |

[0238] A “green tissue-specific promoter” as defined herein is a promoter that is transcriptionally active predominantly in green tissue, substantially to the exclusion of any other parts of a plant, whilst still allowing for any leaky expression in these other plant parts.

[0239] Examples of green tissue-specific promoters which may be used to perform the methods of the invention are shown in Table 2g below.

TABLE 2g
Examples of green tissue-specific promoters

| Gene | Expression | Reference |
|---|---|---|
| Maize Orthophos- | Leaf specific | Fukavama et al., Plant Physiol. |
| phate dikinase | | 2001 Nobember; 127(3): 1136-46 |
| Maize Phosphoenol- | Leaf specific | Kausch et al., Plant Mol Biol. |
| pyruvate | | 2001 January; 45(1): 1-15 |
| carboxylase | | |
| Rice Phosphoenol- | Leaf specific | Liu et al., 2004 DNA Seq. 2004 |
| pyruvate | | August; 15(4): 269-76 |
| carboxylase | | |
| Rice small subunit | Leaf specific | Nomura et al., Plant Mol Biol. |
| Rubisco | | 2000 September; 44(1): 99-106 |
| rice beta expansin | Shoot specific | WO 2004/070039 |
| EXBP9 | | |
| Pigeonpea small | Leaf specific | Panguluri et al., Indian J Exp |
| subunit Rubisco | | Biol. 2005 April; 43(4): 369-72 |
| Pea RBCS3A | Leaf specific | |

[0240] Another example of a tissue-specific promoter is a meristem-specific promoter, which is transcriptionally active predominantly in meristematic tissue, substantially to the exclusion of any other parts of a plant, whilst still allowing for any leaky expression in these other plant parts. Examples of green meristem-specific promoters which may be used to perform the methods of the invention are shown in Table 2h below.

TABLE 2h
Examples of meristem-specific promoters

| Gene source | Expression pattern | Reference |
|---|---|---|
| rice OSH1 | Shoot apical meristem, | Sato et al. (1996) |
| | from embryo globular | Proc. Natl. Acad. Sci. |
| | stage to seedling stage | USA, 93: 8117-8122 |
| Rice metallothionein | Meristem specific | BAD87835.1 |
| WAK1 & WAK 2 | Shoot and root apical | Wagner & Kohorn |
| | meristems, and in ex- | (2001) Plant Cell |
| | panding leaves and sepals | 13(2): 303-318 |

### Terminator

[0241] The term “terminator” encompasses a control sequence which is a DNA sequence at the end of a transcriptional unit which signals 3′ processing and polyadenylation of a primary transcript and termination of transcription. The terminator can be derived from the natural gene, from a variety of other plant genes, or from T-DNA. The terminator to be added may be derived from, for example, the nopaline synthase or octopine synthase genes, or alternatively from another plant gene, or less preferably from any other eukaryotic gene.

### Selectable Marker (Gene)/Reporter Gene

[0242] “Selectable marker”, “selectable marker gene” or “reporter gene” includes any gene that confers a phenotype on a cell in which it is expressed to facilitate the identification and/or selection of cells that are transfected or transformed with a nucleic acid construct of the invention. These marker genes enable the identification of a successful transfer of the nucleic acid molecules via a series of different principles. Suitable markers may be selected from markers that confer antibiotic or herbicide resistance, that introduce a new metabolic trait or that allow visual selection. Examples of selectable marker genes include genes conferring resistance to antibiotics (such as nptII that phosphorylates neomycin and kanamycin, or hpt, phosphorylating hygromycin, or genes conferring resistance to, for example, bleomycin, streptomycin, tetracyclin, chloramphenicol, ampicillin, gentamycin, geneticin (G418), spectinomycin or blasticidin), to herbicides (for example bar which provides resistance to Basta®; aroA or gox providing resistance against glyphosate, or the genes conferring resistance to, for example, imidazolinone, phosphinothricin or sulfonylurea), or genes that provide a metabolic trait (such as manA that allows plants to use mannose as sole carbon source or xylose isomerase for the utilisation of xylose, or antinutritive markers such as the resistance to 2-deoxyglucose). Expression of visual marker genes results in the formation of colour (for example β-glucuronidase, GUS or β-galactosidase with its coloured substrates, for example X-Gal), luminescence (such as the luciferin/luceferase system) or fluorescence (Green Fluorescent Protein, GFP, and derivatives thereof). This list represents only a small number of possible markers. The skilled worker is familiar with such markers. Different markers are preferred, depending on the organism and the selection method.

[0243] It is known that upon stable or transient integration of nucleic acids into plant cells, only a minority of the cells takes up the foreign DNA and, if desired, integrates it into its genome, depending on the expression vector used and the transfection technique used. To identify and select these integrants, a gene coding for a selectable marker (such as the ones described above) is usually introduced into the host cells together with the gene of interest. These markers can for example be used in mutants in which these genes are not functional by, for example, deletion by conventional methods. Furthermore, nucleic acid molecules encoding a selectable marker can be introduced into a host cell on the same vector that comprises the sequence encoding the polypeptides of the invention or used in the methods of the invention, or else in a separate vector. Cells which have been stably transfected with the introduced nucleic acid can be identified for example by selection (for example, cells which have integrated the selectable marker survive whereas the other cells die).

[0244] Since the marker genes, particularly genes for resistance to antibiotics and herbicides, are no longer required or are undesired in the transgenic host cell once the nucleic acids have been introduced successfully, the process according to the invention for introducing the nucleic acids advantageously employs techniques which enable the removal or excision of these marker genes. One such a method is what is known as co-transformation. The co-transformation method employs two vectors simultaneously for the transformation, one vector bearing the nucleic acid according to the invention and a second bearing the marker gene(s). A large proportion of transformants receives or, in the case of plants, comprises (up to 40% or more of the transformants), both vectors. In case of transformation with Agrobacteria, the transformants usually receive only a part of the vector, i.e. the sequence flanked by the T-DNA, which usually represents the expression cassette. The marker genes can subsequently be removed from the transformed plant by performing crosses. In another method, marker genes integrated into a transposon are used for the transformation together with desired nucleic acid (known as the Ac/Ds technology). The transformants can be crossed with a transposase source or the transformants are transformed with a nucleic acid construct conferring expression of a transposase, transiently or stable. In some cases (approx. 10%), the transposon jumps out of the genome of the host cell once transformation has taken place successfully and is lost. In a further number of cases, the transposon jumps to a different location. In these cases the marker gene must be eliminated by performing crosses. In microbiology, techniques were developed which make possible, or facilitate, the detection of such events. A further advantageous method relies on what is known as recombination systems; whose advantage is that elimination by crossing can be dispensed with. The best-known system of this type is what is known as the Cre/lox system. Cre1 is a recombinase that removes the sequences located between the loxP sequences. If the marker gene is integrated between the loxP sequences, it is removed once transformation has taken place successfully, by expression of the recombinase. Further recombination systems are the HIN/HIX, FLP/FRT and REP/STB system (Tribble et al., J. Biol. Chem., 275, 2000: 22255-22267; Velmurugan et al., J. Cell Biol., 149, 2000: 553-566). A site-specific integration into the plant genome of the nucleic acid sequences according to the invention is possible. Naturally, these methods can also be applied to microorganisms such as yeast, fungi or bacteria.

### Transgenic/Transgene/Recombinant

[0245] For the purposes of the invention, “transgenic”, “transgene” or “recombinant” means with regard to, for example, a nucleic acid sequence, an expression cassette, gene construct or a vector comprising the nucleic acid sequence or an organism transformed with the nucleic acid sequences, expression cassettes or vectors according to the invention, all those constructions brought about by recombinant methods in which either
[0246] a) the nucleic acid sequences encoding proteins useful in the methods of the invention, or
[0247] b) genetic control sequence(s) which is operably linked with the nucleic acid sequence according to the invention, for example a promoter, or
[0248] c) a) and b)
   are not located in their natural genetic environment or have been modified by recombinant methods, it being possible for the modification to take the form of, for example, a substitution, addition, deletion, inversion or insertion of one or more nucleotide residues. The natural genetic environment is understood as meaning the natural genomic or chromosomal locus in the original plant or the presence in a genomic library. In the case of a genomic library, the natural genetic environment of the nucleic acid sequence is preferably retained, at least in part. The environment flanks the nucleic acid sequence at least on one side and has a sequence length of at least 50 bp, preferably at least 500 bp, especially preferably at least 1000 bp, most preferably at least 5000 bp. A naturally occurring expression cassette—for example the naturally occurring combination of the natural promoter of the nucleic acid sequences with the corresponding nucleic acid sequence encoding a polypeptide useful in the methods of the present invention, as defined above—becomes a transgenic expression cassette when this expression cassette is modified by non-natural, synthetic (“artificial”) methods such as, for example, mutagenic treatment. Suitable methods are described, for example, in U.S. Pat. No. 5,565,350 or WO 00/15815.

[0249] A transgenic plant for the purposes of the invention is thus understood as meaning, as above, that the nucleic acids used in the method of the invention are not present in, or originating from, the genome of said plant, or are present in the genome of said plant but not at their natural locus in the genome of said plant, it being possible for the nucleic acids to be expressed homologously or heterologously. However, as mentioned, transgenic also means that, while the nucleic acids according to the invention or used in the inventive method are at their natural position in the genome of a plant, the sequence has been modified with regard to the natural sequence, and/or that the regulatory sequences of the natural sequences have been modified. Transgenic is preferably understood as meaning the expression of the nucleic acids according to the invention at an unnatural locus in the genome, i.e. homologous or, preferably, heterologous expression of the nucleic acids takes place. Preferred transgenic plants are mentioned herein.

[0250] It shall further be noted that in the context of the present invention, the term “isolated nucleic acid” or “isolated polypeptide” may in some instances be considered as a synonym for a “recombinant nucleic acid” or a “recombinant polypeptide”, respectively and refers to a nucleic acid or polypeptide that is not located in its natural genetic environment and/or that has been modified by recombinant methods.

[0251] In one embodiment a isolated nucleic acid sequence or isolated nucleic acid molecule is one that is not in its native surrounding or its native nucleic acid neighbourhood, yet is physically and functionally connected to other nucleic acid sequences or nucleic acid molecules and is found as part of a nucleic acid construct, vector sequence or chromosome.

### Modulation

[0252] The term “modulation” means in relation to expression or gene expression, a process in which the expression level is changed by said gene expression in comparison to the control plant, the expression level may be increased or decreased. The original, unmodulated expression may be of any kind of expression of a structural RNA (rRNA, tRNA) or mRNA with subsequent translation. For the purposes of this invention, the original unmodulated expression may also be absence of any expression. The term “modulating the activity” or the term “modulating expression” shall mean any change of the expression of the inventive nucleic acid sequences or encoded proteins, which leads to increased yield and/or increased growth of the plants. The expression can increase from zero (absence of, or immeasurable expression) to a certain amount, or can decrease from a certain amount to immeasurable small amounts or zero.

### Expression

[0253] The term “expression” or “gene expression” means the transcription of a specific gene or specific genes or specific genetic construct. The term “expression” or “gene expression” in particular means the transcription of a gene or genes or genetic construct into structural RNA (rRNA, tRNA) or mRNA with or without subsequent translation of the latter into a protein. The process includes transcription of DNA and processing of the resulting mRNA product.

### Increased Expression/Overexpression

[0254] The term “increased expression” or “overexpression” as used herein means any form of expression that is additional to the original wild-type expression level. For the purposes of this invention, the original wild-type expression level might also be zero, i.e. absence of expression or immeasurable expression.

[0255] Methods for increasing expression of genes or gene products are well documented in the art and include, for example, overexpression driven by appropriate promoters, the use of transcription enhancers or translation enhancers. Isolated nucleic acids which serve as promoter or enhancer elements may be introduced in an appropriate position (typically upstream) of a non-heterologous form of a polynucleotide so as to upregulate expression of a nucleic acid encoding the polypeptide of interest. For example, endogenous promoters may be altered in vivo by mutation, deletion, and/or substitution (see, Kmiec, U.S. Pat. No. 5,565,350; Zarling et al., WO9322443), or isolated promoters may be introduced into a plant cell in the proper orientation and distance from a gene of the present invention so as to control the expression of the gene.

[0256] If polypeptide expression is desired, it is generally desirable to include a polyadenylation region at the 3′-end of a polynucleotide coding region. The polyadenylation region can be derived from the natural gene, from a variety of other plant genes, or from T-DNA. The 3′ end sequence to be added may be derived from, for example, the nopaline synthase or octopine synthase genes, or alternatively from another plant gene, or less preferably from any other eukaryotic gene.

[0257] An intron sequence may also be added to the 5′ untranslated region (UTR) or the coding sequence of the partial coding sequence to increase the amount of the mature message that accumulates in the cytosol. Inclusion of a spliceable intron in the transcription unit in both plant and animal expression constructs has been shown to increase gene expression at both the mRNA and protein levels up to 1000-fold (Buchman and Berg (1988) Mol. Cell biol. 8: 4395-4405; Callis et al. (1987) Genes Dev 1:1183-1200). Such intron enhancement of gene expression is typically greatest when placed near the 5′ end of the transcription unit. Use of the maize introns Adh1-S intron 1, 2, and 6, the Bronze-1 intron are known in the art. For general information see: The Maize Handbook, Chapter 116, Freeling and Walbot, Eds., Springer, N.Y. (1994).

### Decreased Expression

[0258] Reference herein to “decreased expression” or “reduction or substantial elimination” of expression is taken to mean a decrease in endogenous gene expression and/or polypeptide levels and/or polypeptide activity relative to control plants. The reduction or substantial elimination is in increasing order of preference at least 10%, 20%, 30%, 40% or 50%, 60%, 70%, 80%, 85%, 90%, or 95%, 96%, 97%, 98%, 99% or more reduced compared to that of control plants.

[0259] For the reduction or substantial elimination of expression an endogenous gene in a plant, a sufficient length of substantially contiguous nucleotides of a nucleic acid sequence is required. In order to perform gene silencing, this may be as little as 20, 19, 18, 17, 16, 15, 14, 13, 12, 11, 10 or fewer nucleotides, alternatively this may be as much as the entire gene (including the 5′ and/or 3′ UTR, either in part or in whole). The stretch of substantially contiguous nucleotides may be derived from the nucleic acid encoding the protein of interest (target gene), or from any nucleic acid capable of encoding an orthologue, paralogue or homologue of the protein of interest. Preferably, the stretch of substantially contiguous nucleotides is capable of forming hydrogen bonds with the target gene (either sense or antisense strand), more preferably, the stretch of substantially contiguous nucleotides has, in increasing order of preference, 50%, 60%, 70%, 80%, 85%, 90%, 95%, 96%, 97%, 98%, 99%, 100% sequence identity to the target gene (either sense or antisense strand). A nucleic acid sequence encoding a (functional) polypeptide is not a requirement for the various methods discussed herein for the reduction or substantial elimination of expression of an endogenous gene.

[0260] This reduction or substantial elimination of expression may be achieved using routine tools and techniques. A preferred method for the reduction or substantial elimination of endogenous gene expression is by introducing and expressing in a plant a genetic construct into which the nucleic acid (in this case a stretch of substantially contiguous nucleotides derived from the gene of interest, or from any nucleic acid capable of encoding an orthologue, paralogue or homologue of any one of the protein of interest) is cloned as an inverted repeat (in part or completely), separated by a spacer (non-coding DNA).

[0261] In such a preferred method, expression of the endogenous gene is reduced or substantially eliminated through RNA-mediated silencing using an inverted repeat of a nucleic acid or a part thereof (in this case a stretch of substantially contiguous nucleotides derived from the gene of interest, or from any nucleic acid capable of encoding an orthologue, paralogue or homologue of the protein of interest), preferably capable of forming a hairpin structure. The inverted repeat is cloned in an expression vector comprising control sequences. A non-coding DNA nucleic acid sequence (a spacer, for example a matrix attachment region fragment (MAR), an intron, a polylinker, etc.) is located between the two inverted nucleic acids forming the inverted repeat. After transcription of the inverted repeat, a chimeric RNA with a self-complementary structure is formed (partial or complete). This double-stranded RNA structure is referred to as the hairpin RNA (hpRNA). The hpRNA is processed by the plant into siRNAs that are incorporated into an RNA-induced silencing complex (RISC). The RISC further cleaves the mRNA transcripts, thereby substantially reducing the number of mRNA transcripts to be translated into polypeptides. For further general details see for example, Grierson et al. (1998) WO 98/53083; Waterhouse et al. (1999) WO 99/53050).

[0262] Performance of the methods of the invention does not rely on introducing and expressing in a plant a genetic construct into which the nucleic acid is cloned as an inverted repeat, but any one or more of several well-known “gene silencing” methods may be used to achieve the same effects.

[0263] One such method for the reduction of endogenous gene expression is RNA-mediated silencing of gene expression (downregulation). Silencing in this case is triggered in a plant by a double stranded RNA sequence (dsRNA) that is substantially similar to the target endogenous gene. This dsRNA is further processed by the plant into about 20 to about 26 nucleotides called short interfering RNAs (siRNAs). The siRNAs are incorporated into an RNA-induced silencing complex (RISC) that cleaves the mRNA transcript of the endogenous target gene, thereby substantially reducing the number of mRNA transcripts to be translated into a polypeptide. Preferably, the double stranded RNA sequence corresponds to a target gene.

[0264] Another example of an RNA silencing method involves the introduction of nucleic acid sequences or parts thereof (in this case a stretch of substantially contiguous nucleotides derived from the gene of interest, or from any nucleic acid capable of encoding an orthologue, paralogue or homologue of the protein of interest) in a sense orientation into a plant. “Sense orientation” refers to a DNA sequence that is homologous to an mRNA transcript thereof. Introduced into a plant would therefore be at least one copy of the nucleic acid sequence. The additional nucleic acid sequence will reduce expression of the endogenous gene, giving rise to a phenomenon known as co-suppression. The reduction of gene expression will be more pronounced if several additional copies of a nucleic acid sequence are introduced into the plant, as there is a positive correlation between high transcript levels and the triggering of co-suppression.

[0265] Another example of an RNA silencing method involves the use of antisense nucleic acid sequences. An “antisense” nucleic acid sequence comprises a nucleotide sequence that is complementary to a “sense” nucleic acid sequence encoding a protein, i.e. complementary to the coding strand of a double-stranded cDNA molecule or complementary to an mRNA transcript sequence. The antisense nucleic acid sequence is preferably complementary to the endogenous gene to be silenced. The complementarity may be located in the “coding region” and/or in the “non-coding region” of a gene. The term “coding region” refers to a region of the nucleotide sequence comprising codons that are translated into amino acid residues. The term “non-coding region” refers to 5′ and 3′ sequences that flank the coding region that are transcribed but not translated into amino acids (also referred to as 5′ and 3′ untranslated regions).

[0266] Antisense nucleic acid sequences can be designed according to the rules of Watson and Crick base pairing. The antisense nucleic acid sequence may be complementary to the entire nucleic acid sequence (in this case a stretch of substantially contiguous nucleotides derived from the gene of interest, or from any nucleic acid capable of encoding an orthologue, paralogue or homologue of the protein of interest), but may also be an oligonucleotide that is antisense to only a part of the nucleic acid sequence (including the mRNA 5′ and 3′ UTR). For example, the antisense oligonucleotide sequence may be complementary to the region surrounding the translation start site of an mRNA transcript encoding a polypeptide. The length of a suitable antisense oligonucleotide sequence is known in the art and may start from about 50, 45, 40, 35, 30, 25, 20, 15 or 10 nucleotides in length or less. An antisense nucleic acid sequence according to the invention may be constructed using chemical synthesis and enzymatic ligation reactions using methods known in the art. For example, an antisense nucleic acid sequence (e.g., an antisense oligonucleotide sequence) may be chemically synthesized using naturally occurring nucleotides or variously modified nucleotides designed to increase the biological stability of the molecules or to increase the physical stability of the duplex formed between the antisense and sense nucleic acid sequences, e.g., phosphorothioate derivatives and acridine substituted nucleotides may be used. Examples of modified nucleotides that may be used to generate the antisense nucleic acid sequences are well known in the art. Known nucleotide modifications include methylation, cyclization and ‘caps’ and substitution of one or more of the naturally occurring nucleotides with an analogue such as inosine. Other modifications of nucleotides are well known in the art.

[0267] The antisense nucleic acid sequence can be produced biologically using an expression vector into which a nucleic acid sequence has been subcloned in an antisense orientation (i.e., RNA transcribed from the inserted nucleic acid will be of an antisense orientation to a target nucleic acid of interest). Preferably, production of antisense nucleic acid sequences in plants occurs by means of a stably integrated nucleic acid construct comprising a promoter, an operably linked antisense oligonucleotide, and a terminator.

[0268] The nucleic acid molecules used for silencing in the methods of the invention (whether introduced into a plant or generated in situ) hybridize with or bind to mRNA transcripts and/or genomic DNA encoding a polypeptide to thereby inhibit expression of the protein, e.g., by inhibiting transcription and/or translation. The hybridization can be by conventional nucleotide complementarity to form a stable duplex, or, for example, in the case of an antisense nucleic acid sequence which binds to DNA duplexes, through specific interactions in the major groove of the double helix. Antisense nucleic acid sequences may be introduced into a plant by transformation or direct injection at a specific tissue site.

[0269] Alternatively, antisense nucleic acid sequences can be modified to target selected cells and then administered systemically. For example, for systemic administration, antisense nucleic acid sequences can be modified such that they specifically bind to receptors or antigens expressed on a selected cell surface, e.g., by linking the antisense nucleic acid sequence to peptides or antibodies which bind to cell surface receptors or antigens. The antisense nucleic acid sequences can also be delivered to cells using the vectors described herein.

[0270] According to a further aspect, the antisense nucleic acid sequence is an a-anomeric nucleic acid sequence. An a-anomeric nucleic acid sequence forms specific double-stranded hybrids with complementary RNA in which, contrary to the usual b-units, the strands run parallel to each other (Gaultier et al. (1987) Nucl Ac Res 15: 6625-6641). The antisense nucleic acid sequence may also comprise a 2′-o-methylribonucleotide (Inoue et al. (1987) Nucl Ac Res 15, 6131-6148) or a chimeric RNA-DNA analogue (Inoue et al. (1987) FEBS Lett. 215, 327-330).

[0271] The reduction or substantial elimination of endogenous gene expression may also be performed using ribozymes. Ribozymes are catalytic RNA molecules with ribonuclease activity that are capable of cleaving a single-stranded nucleic acid sequence, such as an mRNA, to which they have a complementary region. Thus, ribozymes (e.g., hammerhead ribozymes (described in Haselhoff and Gerlach (1988) Nature 334, 585-591) can be used to catalytically cleave mRNA transcripts encoding a polypeptide, thereby substantially reducing the number of mRNA transcripts to be translated into a polypeptide. A ribozyme having specificity for a nucleic acid sequence can be designed (see for example: Cech et al. U.S. Pat. No. 4,987,071; and Cech et al. U.S. Pat. No. 5,116,742). Alternatively, mRNA transcripts corresponding to a nucleic acid sequence can be used to select a catalytic RNA having a specific ribonuclease activity from a pool of RNA molecules (Bartel and Szostak (1993) Science 261, 1411-1418). The use of ribozymes for gene silencing in plants is known in the art (e.g., Atkins et al. (1994) WO 94/00012; Lenne et al. (1995) WO 95/03404; Lutziger et al. (2000) WO 00/00619; Prinsen et al. (1997) WO 97/13865 and Scott et al. (1997) WO 97/38116).

[0272] Gene silencing may also be achieved by insertion mutagenesis (for example, T-DNA insertion or transposon insertion) or by strategies as described by, among others, Angell and Baulcombe ((1999) Plant J 20(3): 357-62), (Amplicon VIGS WO 98/36083), or Baulcombe (WO 99/15682).

[0273] Gene silencing may also occur if there is a mutation on an endogenous gene and/or a mutation on an isolated gene/nucleic acid subsequently introduced into a plant. The reduction or substantial elimination may be caused by a non-functional polypeptide. For example, the polypeptide may bind to various interacting proteins; one or more mutation(s) and/or truncation(s) may therefore provide for a polypeptide that is still able to bind interacting proteins (such as receptor proteins) but that cannot exhibit its normal function (such as signalling ligand).

[0274] A further approach to gene silencing is by targeting nucleic acid sequences complementary to the regulatory region of the gene (e.g., the promoter and/or enhancers) to form triple helical structures that prevent transcription of the gene in target cells. See Helene, C., Anticancer Drug Res. 6, 569-84, 1991; Helene et al., Ann. N.Y. Acad. Sci. 660, 27-36 1992; and Maher, L. J. Bioassays 14, 807-15, 1992.

[0275] Other methods, such as the use of antibodies directed to an endogenous polypeptide for inhibiting its function in planta, or interference in the signalling pathway in which a polypeptide is involved, will be well known to the skilled man. In particular, it can be envisaged that manmade molecules may be useful for inhibiting the biological function of a target polypeptide, or for interfering with the signalling pathway in which the target polypeptide is involved.

[0276] Alternatively, a screening program may be set up to identify in a plant population natural variants of a gene, which variants encode polypeptides with reduced activity. Such natural variants may also be used for example, to perform homologous recombination.

[0277] Artificial and/or natural microRNAs (miRNAs) may be used to knock out gene expression and/or mRNA translation. Endogenous miRNAs are single stranded small RNAs of typically 19-24 nucleotides long. They function primarily to regulate gene expression and/or mRNA translation. Most plant microRNAs (miRNAs) have perfect or near-perfect complementarity with their target sequences. However, there are natural targets with up to five mismatches. They are processed from longer non-coding RNAs with characteristic fold-back structures by double-strand specific RNases of the Dicer family. Upon processing, they are incorporated in the RNA-induced silencing complex (RISC) by binding to its main component, an Argonaute protein. MiRNAs serve as the specificity components of RISC, since they base-pair to target nucleic acids, mostly mRNAs, in the cytoplasm. Subsequent regulatory events include target mRNA cleavage and destruction and/or translational inhibition. Effects of miRNA overexpression are thus often reflected in decreased mRNA levels of target genes.

[0278] Artificial microRNAs (amiRNAs), which are typically 21 nucleotides in length, can be genetically engineered specifically to negatively regulate gene expression of single or multiple genes of interest. Determinants of plant microRNA target selection are well known in the art. Empirical parameters for target recognition have been defined and can be used to aid in the design of specific amiRNAs, (Schwab et al., Dev. Cell 8, 517-527, 2005). Convenient tools for design and generation of amiRNAs and their precursors are also available to the public (Schwab et al., Plant Cell 18, 1121-1133, 2006).

[0279] For optimal performance, the gene silencing techniques used for reducing expression in a plant of an endogenous gene requires the use of nucleic acid sequences from monocotyledonous plants for transformation of monocotyledonous plants, and from dicotyledonous plants for transformation of dicotyledonous plants. Preferably, a nucleic acid sequence from any given plant species is introduced into that same species. For example, a nucleic acid sequence from rice is transformed into a rice plant. However, it is not an absolute requirement that the nucleic acid sequence to be introduced originates from the same plant species as the plant in which it will be introduced. It is sufficient that there is substantial homology between the endogenous target gene and the nucleic acid to be introduced.

[0280] Described above are examples of various methods for the reduction or substantial elimination of expression in a plant of an endogenous gene. A person skilled in the art would readily be able to adapt the aforementioned methods for silencing so as to achieve reduction of expression of an endogenous gene in a whole plant or in parts thereof through the use of an appropriate promoter, for example.

### Transformation

[0281] The term “introduction” or “transformation” as referred to herein encompasses the transfer of an exogenous polynucleotide into a host cell, irrespective of the method used for transfer. Plant tissue capable of subsequent clonal propagation, whether by organogenesis or embryogenesis, may be transformed with a genetic construct of the present invention and a whole plant regenerated there from. The particular tissue chosen will vary depending on the clonal propagation systems available for, and best suited to, the particular species being transformed. Exemplary tissue targets include leaf disks, pollen, embryos, cotyledons, hypocotyls, megagametophytes, callus tissue, existing meristematic tissue (e.g., apical meristem, axillary buds, and root meristems), and induced meristem tissue (e.g., cotyledon meristem and hypocotyl meristem). The polynucleotide may be transiently or stably introduced into a host cell and may be maintained non-integrated, for example, as a plasmid. Alternatively, it may be integrated into the host genome. The resulting transformed plant cell may then be used to regenerate a transformed plant in a manner known to persons skilled in the art. Alternatively, a plant cell that cannot be regenerated into a plant may be chosen as host cell, i.e. the resulting transformed plant cell does not have the capacity to regenerate into a (whole) plant.

[0282] The transfer of foreign genes into the genome of a plant is called transformation. Transformation of plant species is now a fairly routine technique. Advantageously, any of several transformation methods may be used to introduce the gene of interest into a suitable ancestor cell. The methods described for the transformation and regeneration of plants from plant tissues or plant cells may be utilized for transient or for stable transformation. Transformation methods include the use of liposomes, electroporation, chemicals that increase free DNA uptake, injection of the DNA directly into the plant, particle gun bombardment, transformation using viruses or pollen and microprojection. Methods may be selected from the calcium/polyethylene glycol method for protoplasts (Krens, F. A. et al., (1982) Nature 296, 72-74; Negrutiu I et al. (1987) Plant Mol Biol 8: 363-373); electroporation of protoplasts (Shillito R. D. et al. (1985) Bio/Technol 3, 1099-1102); microinjection into plant material (Crossway A et al., (1986) Mol. Gen Genet 202: 179-185); DNA or RNA-coated particle bombardment (Klein T M et al., (1987) Nature 327: 70) infection with (non-integrative) viruses and the like. Transgenic plants, including transgenic crop plants, are preferably produced via Agrobacterium-mediated transformation. An advantageous transformation method is the transformation in planta. To this end, it is possible, for example, to allow the agrobacteria to act on plant seeds or to inoculate the plant meristem with agrobacteria. It has proved particularly expedient in accordance with the invention to allow a suspension of transformed agrobacteria to act on the intact plant or at least on the flower primordia. The plant is subsequently grown on until the seeds of the treated plant are obtained (Clough and Bent, Plant J. (1998) 16, 735-743). Methods for Agrobacterium-mediated transformation of rice include well known methods for rice transformation, such as those described in any of the following: European patent application EP 1198985 A1, Aldemita and Hodges (Planta 199: 612-617, 1996); Chan et al. (Plant Mol Biol 22 (3): 491-506, 1993), Hiei et al. (Plant J 6 (2): 271-282, 1994), which disclosures are incorporated by reference herein as if fully set forth. In the case of corn transformation, the preferred method is as described in either Ishida et al. (Nat. Biotechnol 14(6): 745-50, 1996) or Frame et al. (Plant Physiol 129(1): 13-22, 2002), which disclosures are incorporated by reference herein as if fully set forth. Said methods are further described by way of example in B. Jenes et al., Techniques for Gene Transfer, in: Transgenic Plants, Vol. 1, Engineering and Utilization, eds. S. D. Kung and R. Wu, Academic Press (1993) 128-143 and in Potrykus Annu. Rev. Plant Physiol. Plant Molec. Biol. 42 (1991) 205-225). The nucleic acids or the construct to be expressed is preferably cloned into a vector, which is suitable for transforming Agrobacterium tumefaciens, for example pBin19 (Bevan et al., Nucl. Acids Res. 12 (1984) 8711). Agrobacteria transformed by such a vector can then be used in known manner for the transformation of plants, such as plants used as a model, like Arabidopsis (Arabidopsis thaliana is within the scope of the present invention not considered as a crop plant), or crop plants such as, by way of example, tobacco plants, for example by immersing bruised leaves or chopped leaves in an agrobacterial solution and then culturing them in suitable media. The transformation of plants by means of Agrobacterium tumefaciens is described, for example, by Hofgen and Willmitzer in Nucl. Acid Res. (1988) 16, 9877 or is known inter alia from F. F. White, Vectors for Gene Transfer in Higher Plants; in Transgenic Plants, Vol. 1, Engineering and Utilization, eds. S. D. Kung and R. Wu, Academic Press, 1993, pp. 15-38.

[0283] In addition to the transformation of somatic cells, which then have to be regenerated into intact plants, it is also possible to transform the cells of plant meristems and in particular those cells which develop into gametes. In this case, the transformed gametes follow the natural plant development, giving rise to transgenic plants. Thus, for example, seeds of Arabidopsis are treated with agrobacteria and seeds are obtained from the developing plants of which a certain proportion is transformed and thus transgenic [Feldman, K A and Marks M D (1987). Mol Gen Genet 208:1-9; Feldmann K (1992). In: C Koncz, N-H Chua and J Shell, eds, Methods in Arabidopsis Research. Word Scientific, Singapore, pp. 274-289]. Alternative methods are based on the repeated removal of the inflorescences and incubation of the excision site in the center of the rosette with transformed agrobacteria, whereby transformed seeds can likewise be obtained at a later point in time (Chang (1994). Plant J. 5: 551-558; Katavic (1994). Mol Gen Genet, 245: 363-370). However, an especially effective method is the vacuum infiltration method with its modifications such as the “floral dip” method. In the case of vacuum infiltration of Arabidopsis, intact plants under reduced pressure are treated with an agrobacterial suspension [Bechthold, N (1993). C R Acad Sci Paris Life Sci, 316: 1194-1199], while in the case of the “floral dip” method the developing floral tissue is incubated briefly with a surfactant-treated agrobacterial suspension [Clough, S J and Bent A F (1998) The Plant J. 16, 735-743]. A certain proportion of transgenic seeds are harvested in both cases, and these seeds can be distinguished from non-transgenic seeds by growing under the above-described selective conditions. In addition the stable transformation of plastids is of advantages because plastids are inherited maternally is most crops reducing or eliminating the risk of transgene flow through pollen. The transformation of the chloroplast genome is generally achieved by a process which has been schematically displayed in Klaus et al., 2004 [Nature Biotechnology 22 (2), 225-229]. Briefly the sequences to be transformed are cloned together with a selectable marker gene between flanking sequences homologous to the chloroplast genome. These homologous flanking sequences direct site specific integration into the plastome. Plastidal transformation has been described for many different plant species and an overview is given in Bock (2001) Transgenic plastids in basic research and plant biotechnology. J Mol Biol. 2001 Sep. 21; 312 (3):425-38 or Maliga, P (2003) Progress towards commercialization of plastid transformation technology. Trends Biotechnol. 21, 20-28. Further biotechnological progress has recently been reported in form of marker free plastid transformants, which can be produced by a transient co-integrated maker gene (Klaus et al., 2004, Nature Biotechnology 22(2), 225-229).

[0284] The genetically modified plant cells can be regenerated via all methods with which the skilled worker is familiar. Suitable methods can be found in the abovementioned publications by S. D. Kung and R. Wu, Potrykus or Hofgen and Willmitzer. Alternatively, the genetically modified plant cells are non-regenerable into a whole plant.

[0285] Generally after transformation, plant cells or cell groupings are selected for the presence of one or more markers which are encoded by plant-expressible genes co-transferred with the gene of interest, following which the transformed material is regenerated into a whole plant. To select transformed plants, the plant material obtained in the transformation is, as a rule, subjected to selective conditions so that transformed plants can be distinguished from untransformed plants. For example, the seeds obtained in the above-described manner can be planted and, after an initial growing period, subjected to a suitable selection by spraying. A further possibility consists in growing the seeds, if appropriate after sterilization, on agar plates using a suitable selection agent so that only the transformed seeds can grow into plants. Alternatively, the transformed plants are screened for the presence of a selectable marker such as the ones described above.

[0286] Following DNA transfer and regeneration, putatively transformed plants may also be evaluated, for instance using Southern analysis, for the presence of the gene of interest, copy number and/or genomic organisation. Alternatively or additionally, expression levels of the newly introduced DNA may be monitored using Northern and/or Western analysis, both techniques being well known to persons having ordinary skill in the art.

[0287] The generated transformed plants may be propagated by a variety of means, such as by clonal propagation or classical breeding techniques. For example, a first generation (or T1) transformed plant may be selfed and homozygous second-generation (or T2) transformants selected, and the T2 plants may then further be propagated through classical breeding techniques. The generated transformed organisms may take a variety of forms. For example, they may be chimeras of transformed cells and non-transformed cells; clonal transformants (e.g., all cells transformed to contain the expression cassette); grafts of transformed and untransformed tissues (e.g., in plants, a transformed rootstock grafted to an untransformed scion).

[0288] Throughout this application a plant, plant part, seed or plant cell transformed with—or interchangeably transformed by—a construct or transformed with or by a nucleic acid is to be understood as meaning a plant, plant part, seed or plant cell that carries said construct or said nucleic acid as a transgene due the result of an introduction of said construct or said nucleic acid by biotechnological means. The plant, plant part, seed or plant cell therefore comprises said recombinant construct or said recombinant nucleic acid. Any plant, plant part, seed or plant cell that no longer contains said recombinant construct or said recombinant nucleic acid after introduction in the past, is termed null-segregant, nullizygote or null control, but is not considered a plant, plant part, seed or plant cell transformed with said construct or with said nucleic acid within the meaning of this application.

### T-DNA Activation Tagging

[0289] “T-DNA activation” tagging (Hayashi et al. Science (1992) 1350-1353), involves insertion of T-DNA, usually containing a promoter (may also be a translation enhancer or an intron), in the genomic region of the gene of interest or 10 kb up- or downstream of the coding region of a gene in a configuration such that the promoter directs expression of the targeted gene. Typically, regulation of expression of the targeted gene by its natural promoter is disrupted and the gene falls under the control of the newly introduced promoter. The promoter is typically embedded in a T-DNA. This T-DNA is randomly inserted into the plant genome, for example, through Agrobacterium infection and leads to modified expression of genes near the inserted T-DNA. The resulting transgenic plants show dominant phenotypes due to modified expression of genes close to the introduced promoter.

### Tilling

[0290] The term “TILLING” is an abbreviation of “Targeted Induced Local Lesions In Genomes” and refers to a mutagenesis technology useful to generate and/or identify nucleic acids encoding proteins with modified expression and/or activity. TILLING also allows selection of plants carrying such mutant variants. These mutant variants may exhibit modified expression, either in strength or in location or in timing (if the mutations affect the promoter for example). These mutant variants may exhibit higher activity than that exhibited by the gene in its natural form. TILLING combines high-density mutagenesis with high-throughput screening methods. The steps typically followed in TILLING are: (a) EMS mutagenesis (Redei G P and Koncz C (1992) In Methods in Arabidopsis Research, Koncz C, Chua N H, Schell J, eds. Singapore, World Scientific Publishing Co, pp. 16-82; Feldmann et al., (1994) In Meyerowitz E M, Somerville C R, eds, Arabidopsis. Cold Spring Harbor Laboratory Press, Cold Spring Harbor, N.Y., pp 137-172; Lightner J and Caspar T (1998) In J Martinez-Zapater, J Salinas, eds, Methods on Molecular Biology, Vol. 82. Humana Press, Totowa, N.J., pp 91-104); (b) DNA preparation and pooling of individuals; (c) PCR amplification of a region of interest; (d) denaturation and annealing to allow formation of heteroduplexes; (e) DHPLC, where the presence of a heteroduplex in a pool is detected as an extra peak in the chromatogram; (f) identification of the mutant individual; and (g) sequencing of the mutant PCR product. Methods for TILLING are well known in the art (McCallum et al., (2000) Nat Biotechnol 18: 455-457; reviewed by Stemple (2004) Nat Rev Genet 5(2): 145-50).

### Homologous Recombination

[0291] “Homologous recombination” allows introduction in a genome of a selected nucleic acid at a defined selected position. Homologous recombination is a standard technology used routinely in biological sciences for lower organisms such as yeast or the moss Physcomitrella. Methods for performing homologous recombination in plants have been described not only for model plants (Offringa et al. (1990) EMBO J 9(10): 3077-84) but also for crop plants, for example rice (Terada et al. (2002) Nat Biotech 20(10): 1030-4; lida and Terada (2004) Curr Opin Biotech 15(2): 132-8), and approaches exist that are generally applicable regardless of the target organism (Miller et al, Nature Biotechnol. 25, 778-785, 2007).

### Yield Related Trait(s)

[0292] A “Yield related trait” is a trait or feature which is related to plant yield. Yield-related traits may comprise one or more of the following non-limitative list of features: early flowering time, yield, biomass, seed yield, early vigour, greenness index, growth rate, agronomic traits, such as e.g. tolerance to submergence (which leads to yield in rice), Water Use Efficiency (WUE), Nitrogen Use Efficiency (NUE), etc.

[0293] Reference herein to enhanced yield-related traits, relative to of control plants is taken to mean one or more of an increase in early vigour and/or in biomass (weight) of one or more parts of a plant, which may include (i) aboveground parts and preferably aboveground harvestable parts and/or (ii) parts below ground and preferably harvestable below ground. In particular, such harvestable parts are roots such as taproots, stems, beets, leaves, flowers or seeds, and performance of the methods of the invention results in plants having increased seed yield relative to the seed yield of control plants, and/or increased stem biomass relative to the stem biomass of control plants, and/or increased root biomass relative to the root biomass of control plants and/or increased beet biomass relative to the beet biomass of control plants. Moreover, it is particularly contemplated that the sugar content (in particular the sucrose content) in the above ground parts, particularly stem (in particular of sugar cane plants) and/or in the belowground parts, in particular in roots including taproots, tubers and/or beets (in particular in sugar beets) is increased relative to the sugar content (in particular the sucrose content) in corresponding part(s) of the control plant.

### Yield

[0294] The term “yield” in general means a measurable produce of economic value, typically related to a specified crop, to an area, and to a period of time. Individual plant parts directly contribute to yield based on their number, size and/or weight, or the actual yield is the yield per square meter for a crop and year, which is determined by dividing total production (includes both harvested and appraised production) by planted square meters.

[0295] The terms “yield” of a plant and “plant yield” are used interchangeably herein and are meant to refer to vegetative biomass such as root and/or shoot biomass, to reproductive organs, and/or to propagules such as seeds of that plant.

[0296] Flowers in maize are unisexual; male inflorescences (tassels) originate from the apical stem and female inflorescences (ears) arise from axillary bud apices. The female inflorescence produces pairs of spikelets on the surface of a central axis (cob). Each of the female spikelets encloses two fertile florets, one of them will usually mature into a maize kernel once fertilized. Hence a yield increase in maize may be manifested as one or more of the following: increase in the number of plants established per square meter, an increase in the number of ears per plant, an increase in the number of rows, number of kernels per row, kernel weight, thousand kernel weight, ear length/diameter, increase in the seed filling rate, which is the number of filled florets (i.e. florets containing seed) divided by the total number of florets and multiplied by 100), among others.

[0297] Inflorescences in rice plants are named panicles. The panicle bears spikelets, which are the basic units of the panicles, and which consist of a pedicel and a floret. The floret is borne on the pedicel and includes a flower that is covered by two protective glumes: a larger glume (the lemma) and a shorter glume (the palea). Hence, taking rice as an example, a yield increase may manifest itself as an increase in one or more of the following: number of plants per square meter, number of panicles per plant, panicle length, number of spikelets per panicle, number of flowers (or florets) per panicle; an increase in the seed filling rate which is the number of filled florets (i.e. florets containing seeds) divided by the total number of florets and multiplied by 100; an increase in thousand kernel weight, among others.

### Early Flowering Time

[0298] Plants having an “early flowering time” as used herein are plants which start to flower earlier than control plants. Hence this term refers to plants that show an earlier start of flowering. Flowering time of plants can be assessed by counting the number of days (“time to flower”) between sowing and the emergence of a first inflorescence. The “flowering time” of a plant can for instance be determined using the method as described in WO 2007/093444.

### Early Vigour

[0299] “Early vigour” refers to active healthy well-balanced growth especially during early stages of plant growth, and may result from increased plant fitness due to, for example, the plants being better adapted to their environment (i.e. optimizing the use of energy resources and partitioning between shoot and root). Plants having early vigour also show increased seedling survival and a better establishment of the crop, which often results in highly uniform fields (with the crop growing in uniform manner, i.e. with the majority of plants reaching the various stages of development at substantially the same time), and often better and higher yield. Therefore, early vigour may be determined by measuring various factors, such as thousand kernel weight, percentage germination, percentage emergence, seedling growth, seedling height, root length, root and shoot biomass and many more.

### Increased Growth Rate

[0300] The increased growth rate may be specific to one or more parts of a plant (including seeds), or may be throughout substantially the whole plant. Plants having an increased growth rate may have a shorter life cycle. The life cycle of a plant may be taken to mean the time needed to grow from a mature seed up to the stage where the plant has produced mature seeds, similar to the starting material. This life cycle may be influenced by factors such as speed of germination, early vigour, growth rate, greenness index, flowering time and speed of seed maturation. The increase in growth rate may take place at one or more stages in the life cycle of a plant or during substantially the whole plant life cycle. Increased growth rate during the early stages in the life cycle of a plant may reflect enhanced vigour. The increase in growth rate may alter the harvest cycle of a plant allowing plants to be sown later and/or harvested sooner than would otherwise be possible (a similar effect may be obtained with earlier flowering time). If the growth rate is sufficiently increased, it may allow for the further sowing of seeds of the same plant species (for example sowing and harvesting of rice plants followed by sowing and harvesting of further rice plants all within one conventional growing period). Similarly, if the growth rate is sufficiently increased, it may allow for the further sowing of seeds of different plants species (for example the sowing and harvesting of corn plants followed by, for example, the sowing and optional harvesting of soybean, potato or any other suitable plant). Harvesting additional times from the same rootstock in the case of some crop plants may also be possible. Altering the harvest cycle of a plant may lead to an increase in annual biomass production per square meter (due to an increase in the number of times (say in a year) that any particular plant may be grown and harvested). An increase in growth rate may also allow for the cultivation of transgenic plants in a wider geographical area than their wild-type counterparts, since the territorial limitations for growing a crop are often determined by adverse environmental conditions either at the time of planting (early season) or at the time of harvesting (late season). Such adverse conditions may be avoided if the harvest cycle is shortened. The growth rate may be determined by deriving various parameters from growth curves, such parameters may be: T-Mid (the time taken for plants to reach 50% of their maximal size) and T-90 (time taken for plants to reach 90% of their maximal size), amongst others.

### Stress Resistance

[0301] An increase in yield and/or growth rate occurs whether the plant is under non-stress conditions or whether the plant is exposed to various stresses compared to control plants. Plants typically respond to exposure to stress by growing more slowly. In conditions of severe stress, the plant may even stop growing altogether. Mild stress on the other hand is defined herein as being any stress to which a plant is exposed which does not result in the plant ceasing to grow altogether without the capacity to resume growth. Mild stress in the sense of the invention leads to a reduction in the growth of the stressed plants of less than 40%, 35%, 30% or 25%, more preferably less than 20% or 15% in comparison to the control plant under non-stress conditions. Due to advances in agricultural practices (irrigation, fertilization, pesticide treatments) severe stresses are not often encountered in cultivated crop plants. As a consequence, the compromised growth induced by mild stress is often an undesirable feature for agriculture. Abiotic stresses may be due to drought or excess water, anaerobic stress, salt stress, chemical toxicity, oxidative stress and hot, cold or freezing temperatures.

[0302] “Biotic stresses” are typically those stresses caused by pathogens, such as bacteria, viruses, fungi, nematodes and insects.

[0303] The “abiotic stress” may be an osmotic stress caused by a water stress, e.g. due to drought, salt stress, or freezing stress. Abiotic stress may also be an oxidative stress or a cold stress. “Freezing stress” is intended to refer to stress due to freezing temperatures, i.e. temperatures at which available water molecules freeze and turn into ice. “Cold stress”, also called “chilling stress”, is intended to refer to cold temperatures, e.g. temperatures below 10°, or preferably below 5° C., but at which water molecules do not freeze. As reported in Wang et al. (Planta (2003) 218: 1-14), abiotic stress leads to a series of morphological, physiological, biochemical and molecular changes that adversely affect plant growth and productivity. Drought, salinity, extreme temperatures and oxidative stress are known to be interconnected and may induce growth and cellular damage through similar mechanisms. Rabbani et al. (Plant Physiol (2003) 133: 1755-1767) describes a particularly high degree of “cross talk” between drought stress and high-salinity stress. For example, drought and/or salinisation are manifested primarily as osmotic stress, resulting in the disruption of homeostasis and ion distribution in the cell. Oxidative stress, which frequently accompanies high or low temperature, salinity or drought stress, may cause denaturing of functional and structural proteins. As a consequence, these diverse environmental stresses often activate similar cell signalling pathways and cellular responses, such as the production of stress proteins, up-regulation of anti-oxidants, accumulation of compatible solutes and growth arrest. The term “non-stress” conditions as used herein are those environmental conditions that allow optimal growth of plants. Persons skilled in the art are aware of normal soil conditions and climatic conditions for a given location. Plants with optimal growth conditions, (grown under non-stress conditions) typically yield in increasing order of preference at least 97%, 95%, 92%, 90%, 87%, 85%, 83%, 80%, 77% or 75% of the average production of such plant in a given environment. Average production may be calculated on harvest and/or season basis. Persons skilled in the art are aware of average yield productions of a crop.

[0304] In particular, the methods of the present invention may be performed under non-stress conditions. In an example, the methods of the present invention may be performed under non-stress conditions such as mild drought to give plants having increased yield relative to control plants.

[0305] In another embodiment, the methods of the present invention may be performed under stress conditions.

[0306] In an example, the methods of the present invention may be performed under stress conditions such as drought to give plants having increased yield relative to control plants. In another example, the methods of the present invention may be performed under stress conditions such as nutrient deficiency to give plants having increased yield relative to control plants.

[0307] Nutrient deficiency may result from a lack of nutrients such as nitrogen, phosphates and other phosphorous-containing compounds, potassium, calcium, magnesium, manganese, iron and boron, amongst others.

[0308] In yet another example, the methods of the present invention may be performed under stress conditions such as salt stress to give plants having increased yield relative to control plants. The term salt stress is not restricted to common salt (NaCl), but may be any one or more of: NaCl, KCl, LiCl, MgCl2, CaCl2, amongst others.

[0309] In yet another example, the methods of the present invention may be performed under stress conditions such as cold stress or freezing stress to give plants having increased yield relative to control plants.

### Increase/Improve/Enhance

[0310] The terms “increase”, “improve” or “enhance” are interchangeable and shall mean in the sense of the application at least a 3%, 4%, 5%, 6%, 7%, 8%, 9% or 10%, preferably at least 15% or 20%, more preferably 25%, 30%, 35% or 40% more yield and/or growth in comparison to control plants as defined herein.

### Seed Yield

[0311] Increased seed yield may manifest itself as one or more of the following:
[0312] a) an increase in seed biomass (total seed weight) which may be on an individual seed basis and/or per plant and/or per square meter;
[0313] b) increased number of flowers per plant;
[0314] c) increased number of seeds;
[0315] d) increased seed filling rate (which is expressed as the ratio between the number of filled florets divided by the total number of florets);
[0316] e) increased harvest index, which is expressed as a ratio of the yield of harvestable parts, such as seeds, divided by the biomass of aboveground plant parts; and
[0317] f) increased thousand kernel weight (TKW), which is extrapolated from the number of seeds counted and their total weight. An increased TKW may result from an increased seed size and/or seed weight, and may also result from an increase in embryo and/or endosperm size.

[0318] The terms “filled florets” and “filled seeds” may be considered synonyms.

[0319] An increase in seed yield may also be manifested as an increase in seed size and/or seed volume. Furthermore, an increase in seed yield may also manifest itself as an increase in seed area and/or seed length and/or seed width and/or seed perimeter.

### Greenness Index

[0320] The “greenness index” as used herein is calculated from digital images of plants. For each pixel belonging to the plant object on the image, the ratio of the green value versus the red value (in the RGB model for encoding color) is calculated. The greenness index is expressed as the percentage of pixels for which the green-to-red ratio exceeds a given threshold. Under normal growth conditions, under salt stress growth conditions, and under reduced nutrient availability growth conditions, the greenness index of plants is measured in the last imaging before flowering. In contrast, under drought stress growth conditions, the greenness index of plants is measured in the first imaging after drought.

### Biomass

[0321] The term “biomass” as used herein is intended to refer to the total weight of a plant. Within the definition of biomass, a distinction may be made between the biomass of one or more parts of a plant, which may include any one or more of the following:
[0322] aboveground parts such as but not limited to shoot biomass, seed biomass, leaf biomass, etc.;
[0323] aboveground harvestable parts such as but not limited to shoot biomass, seed biomass, leaf biomass, etc.;
[0324] parts below ground, such as but not limited to root biomass, tubers, bulbs, etc.;
[0325] harvestable parts below ground, such as but not limited to root biomass, tubers, bulbs, etc.;
[0326] harvestable parts partially below ground such as but not limited to beets and other hypocotyl areas of a plant, rhizomes, stolons or creeping rootstalks;
[0327] vegetative biomass such as root biomass, shoot biomass, etc.;
[0328] reproductive organs; and
[0329] propagules such as seed.

### Marker Assisted Breeding

[0330] Such breeding programmes sometimes require introduction of allelic variation by mutagenic treatment of the plants, using for example EMS mutagenesis; alternatively, the programme may start with a collection of allelic variants of so called “natural” origin caused unintentionally. Identification of allelic variants then takes place, for example, by PCR. This is followed by a step for selection of superior allelic variants of the sequence in question and which give increased yield. Selection is typically carried out by monitoring growth performance of plants containing different allelic variants of the sequence in question. Growth performance may be monitored in a greenhouse or in the field. Further optional steps include crossing plants in which the superior allelic variant was identified with another plant. This could be used, for example, to make a combination of interesting phenotypic features.

### Use as Probes in (Gene Mapping)

[0331] Use of nucleic acids encoding the protein of interest for genetically and physically mapping the genes requires only a nucleic acid sequence of at least 15 nucleotides in length. These nucleic acids may be used as restriction fragment length polymorphism (RFLP) markers. Southern blots (Sambrook J, Fritsch E F and Maniatis T (1989) Molecular Cloning, A Laboratory Manual) of restriction-digested plant genomic DNA may be probed with the nucleic acids encoding the protein of interest. The resulting banding patterns may then be subjected to genetic analyses using computer programs such as MapMaker (Lander et al. (1987) Genomics 1: 174-181) in order to construct a genetic map. In addition, the nucleic acids may be used to probe Southern blots containing restriction endonuclease-treated genomic DNAs of a set of individuals representing parent and progeny of a defined genetic cross. Segregation of the DNA polymorphisms is noted and used to calculate the position of the nucleic acid encoding the protein of interest in the genetic map previously obtained using this population (Botstein et al. (1980) Am. J. Hum. Genet. 32:314-331).

[0332] The production and use of plant gene-derived probes for use in genetic mapping is described in Bernatzky and Tanksley (1986) Plant Mol. Biol. Reporter 4: 37-41. Numerous publications describe genetic mapping of specific cDNA clones using the methodology outlined above or variations thereof. For example, F2 intercross populations, backcross populations, randomly mated populations, near isogenic lines, and other sets of individuals may be used for mapping. Such methodologies are well known to those skilled in the art.

[0333] The nucleic acid probes may also be used for physical mapping (i.e., placement of sequences on physical maps; see Hoheisel et al. In: Non-mammalian Genomic Analysis: A Practical Guide, Academic press 1996, pp. 319-346, and references cited therein).

[0334] In another embodiment, the nucleic acid probes may be used in direct fluorescence in situ hybridisation (FISH) mapping (Trask (1991) Trends Genet. 7:149-154). Although current methods of FISH mapping favour use of large clones (several kb to several hundred kb; see Laan et al. (1995) Genome Res. 5:13-20), improvements in sensitivity may allow performance of FISH mapping using shorter probes.

[0335] A variety of nucleic acid amplification-based methods for genetic and physical mapping may be carried out using the nucleic acids. Examples include allele-specific amplification (Kazazian (1989) J. Lab. Clin. Med 11:95-96), polymorphism of PCR-amplified fragments (CAPS; Sheffield et al. (1993) Genomics 16:325-332), allele-specific ligation (Landegren et al. (1988) Science 241:1077-1080), nucleotide extension reactions (Sokolov (1990) Nucleic Acid Res. 18:3671), Radiation Hybrid Mapping (Walter et al. (1997) Nat. Genet. 7:22-28) and Happy Mapping (Dear and Cook (1989) Nucleic Acid Res. 17:6795-6807). For these methods, the sequence of a nucleic acid is used to design and produce primer pairs for use in the amplification reaction or in primer extension reactions. The design of such primers is well known to those skilled in the art. In methods employing PCR-based genetic mapping, it may be necessary to identify DNA sequence differences between the parents of the mapping cross in the region corresponding to the instant nucleic acid sequence. This, however, is generally not necessary for mapping methods.

### Plant

[0336] The term “plant” as used herein encompasses whole plants, ancestors and progeny of the plants and plant parts, including seeds, shoots, stems, leaves, roots (including tubers), flowers, and tissues and organs, wherein each of the aforementioned comprise the gene/nucleic acid of interest. The term “plant” also encompasses plant cells, suspension cultures, callus tissue, embryos, meristematic regions, gametophytes, sporophytes, pollen and microspores, again wherein each of the aforementioned comprises the gene/nucleic acid of interest.

[0337] Plants that are particularly useful in the methods of the invention include all plants which belong to the superfamily Viridiplantae, in particular monocotyledonous and dicotyledonous plants including fodder or forage legumes, ornamental plants, food crops, trees or shrubs selected from the list comprising Acer spp., Actinidia spp., Abelmoschus spp., Agave sisalana, Agropyron spp., Agrostis stolonifera, Allium spp., Amaranthus spp., Ammophila arenaria, Ananas comosus, Annona spp., Apium graveolens, Arachis spp, Artocarpus spp., Asparagus officinalis, Avena spp. (e.g. Avena sativa, Avena fatua, Avena byzantina, Avena fatua var. sativa, Avena hybrida), Averrhoa carambola, Bambusa sp., Benincasa hispida, Bertholletia excelsea, Beta vulgaris, Brassica spp. (e.g. Brassica napus, Brassica rapa ssp. [canola, oilseed rape, turnip rape]), Cadaba farinosa, Camellia sinensis, Canna indica, Cannabis sativa, Capsicum spp., Carex elata, Carica papaya, Carissa macrocarpa, Carya spp., Carthamus tinctorius, Castanea spp., Ceiba pentandra, Cichorium endivia, Cinnamomum spp., Citrullus lanatus, Citrus spp., Cocos spp., Coffea spp., Colocasia esculenta, Cola spp., Corchorus sp., Coriandrum sativum, Corylus spp., Crataegus spp., Crocus sativus, Cucurbita spp., Cucumis spp., Cynara spp., Daucus carota, Desmodium spp., Dimocarpus longan, Dioscorea spp., Diospyros spp., Echinochloa spp., Elaeis (e.g. Elaeis guineensis, Elaeis oleifera), Eleusine coracana, Eragrostis tef, Erianthus sp., Eriobotrya japonica, Eucalyptus sp., Eugenia uniflora, Fagopyrum spp., Fagus spp., Festuca arundinacea, Ficus carica, Fortunella spp., Fragaria spp., Ginkgo biloba, Glycine spp. (e.g. Glycine max, Soja hispida or Soja max), Gossypium hirsutum, Helianthus spp. (e.g. Helianthus annuus), Hemerocallis fulva, Hibiscus spp., Hordeum spp. (e.g. Hordeum vulgare), Ipomoea batatas, Juglans spp., Lactuca sativa, Lathyrus spp., Lens culinaris, Linum usitatissimum, Litchi chinensis, Lotus spp., Luffa acutangula, Lupinus spp., Luzula sylvatica, Lycopersicon spp. (e.g. Lycopersicon esculentum, Lycopersicon lycopersicum, Lycopersicon pyriforme), Macrotyloma spp., Malus spp., Malpighia emarginata, Mammea americana, Mangifera indica, Manihot spp., Manilkara zapota, Medicago sativa, Melilotus spp., Mentha spp., Miscanthus sinensis, Momordica spp., Morus nigra, Musa spp., Nicotiana spp., Olea spp., Opuntia spp., Ornithopus spp., Oryza spp. (e.g. Oryza sativa, Oryza latifolia), Panicum miliaceum, Panicum virgatum, Passiflora edulis, Pastinaca sativa, Pennisetum sp., Persea spp., Petroselinum crispum, Phalaris arundinacea, Phaseolus spp., Phleum pratense, Phoenix spp., Phragmites australis, Physalis spp., Pinus spp., Pistacia vera, Pisum spp., Poa spp., Populus spp., Prosopis spp., Prunus spp., Psidium spp., Punica granatum, Pyrus communis, Quercus spp., Raphanus sativus, Rheum rhabarbarum, Ribes spp., Ricinus communis, Rubus spp., Saccharum spp., Salix sp., Sambucus spp., Secale cereale, Sesamum spp., Sinapis sp., Solanum spp. (e.g. Solanum tuberosum, Solanum integrifolium or Solanum lycopersicum), Sorghum bicolor, Spinacia spp., Syzygium spp., Tagetes spp., Tamarindus indica, Theobroma cacao, Trifolium spp., Tripsacum dactyloides, Triticosecale rimpaui, Triticum spp. (e.g. Triticum aestivum, Triticum durum, Triticum turgidum, Triticum hybernum, Triticum macha, Triticum sativum, Triticum monococcum or Triticum vulgare), Tropaeolum minus, Tropaeolum majus, Vaccinium spp., Vicia spp., Vigna spp., Viola odorata, Vitis spp., Zea mays, Zizania palustris, Ziziphus spp., amongst others.

[0338] With respect to the sequences of the invention, a nucleic acid or a polypeptide sequence of plant origin has the characteristic of a codon usage optimised for expression in plants, and of the use of amino acids and regulatory sites common in plants, respectively. The plant of origin may be any plant, but preferably those plants as described in the previous paragraph.

### Control Plant(s)

[0339] The choice of suitable control plants is a routine part of an experimental setup and may include corresponding wild type plants or corresponding plants without the gene of interest. The control plant is typically of the same plant species or even of the same variety as the plant to be assessed. The control plant may also be a nullizygote of the plant to be assessed. Nullizygotes (or null control plants) are individuals missing the transgene by segregation. Further, control plants are grown under equal growing conditions to the growing conditions of the plants of the invention, i.e. in the vicinity of, and simultaneously with, the plants of the invention. A “control plant” as used herein refers not only to whole plants, but also to plant parts, including seeds and seed parts.

### DESCRIPTION OF FIGURES

[0340] The present invention will now be described with reference to the following figures in which:

[0341] FIG. 1 represents the domain structure of SEQ ID NO: 2 with conserved motifs (or domains) 1 to 3 indicated by underlined region and corresponding motif number.

[0342] FIG. 2 represents a multiple alignment of various HhH-GPD-related polypeptides. The asterisks indicate identical amino acids among the various protein sequences, colons represent highly conserved amino acid substitutions, and the dots represent less conserved amino acid substitution; on other positions there is no sequence conservation. These alignments can be used for defining further motifs or signature sequences, when using conserved amino acids.

[0343] FIG. 3 shows the MATGAT table of Example 3.

[0344] FIG. 4 represents the binary vector used for increased expression in Oryza sativa of a HhH-GPD-related polypeptide-encoding nucleic acid under the control of a rice GOS2 promoter (pGOS2).

[0345] FIG. 5 represents the domain structure of SEQ ID NO: 81 with conserved motifs 4 to 6.

[0346] FIG. 6 represents the binary vector used for increased expression in Oryza sativa of a calnexin-related-encoding nucleic acid under the control of a rice GOS2 promoter (pGOS2).

[0347] FIG. 7 shows the MATGAT table of Example 3.

[0348] FIG. 8 represents a multiple alignment of various calnexin-related polypeptides. The asterisks indicate identical amino acids among the various protein sequences, colons represent highly conserved amino acid substitutions, and the dots represent less conserved amino acid substitution; on other positions there is no sequence conservation. These alignments can be used for defining further motifs or signature sequences, when using conserved amino acids.

### EXAMPLES

[0349] The present invention will now be described with reference to the following examples, which are by way of illustration only. The following examples are not intended to limit the scope of the invention. Unless otherwise indicated, the present invention employs conventional techniques and methods of plant biology, molecular biology, bioinformatics and plant breedings.

[0350] DNA manipulation: unless otherwise stated, recombinant DNA techniques are performed according to standard protocols described in (Sambrook (2001) Molecular Cloning: a laboratory manual, 3rd Edition Cold Spring Harbor Laboratory Press, CSH, New York) or in Volumes 1 and 2 of Ausubel et al. (1994), Current Protocols in Molecular Biology, Current Protocols. Standard materials and methods for plant molecular work are described in Plant Molecular Biology Labfax (1993) by R. D. D. Croy, published by BIOS Scientific Publications Ltd (UK) and Blackwell Scientific Publications (UK).

### Example 1

### Identification of Sequences Related to the Nucleic Acid Sequence Used in the Methods of Intervention

### 1. HhH-GPD-Related Polypeptides

[0351] Sequences (full length cDNA, ESTs or genomic) related to SEQ ID NO: 1 and SEQ ID NO: 2 were identified amongst those maintained in the Entrez Nucleotides database at the National Center for Biotechnology Information (NCBI) using database sequence search tools, such as the Basic Local Alignment Tool (BLAST) (Altschul et al. (1990) J. Mol. Biol. 215:403-410; and Altschul et al. (1997) Nucleic Acids Res. 25:3389-3402). The program is used to find regions of local similarity between sequences by comparing nucleic acid or polypeptide sequences to sequence databases and by calculating the statistical significance of matches. For example, the polypeptide encoded by the nucleic acid of SEQ ID NO: 1 was used for the TBLASTN algorithm, with default settings and the filter to ignore low complexity sequences set off. The output of the analysis was viewed by pairwise comparison, and ranked according to the probability score (E-value), where the score reflect the probability that a particular alignment occurs by chance (the lower the E-value, the more significant the hit). In addition to E-values, comparisons were also scored by percentage identity. Percentage identity refers to the number of identical nucleotides (or amino acids) between the two compared nucleic acid (or polypeptide) sequences over a particular length. In some instances, the default parameters may be adjusted to modify the stringency of the search. For example the E-value may be increased to show less stringent matches. This way, short nearly exact matches may be identified.

[0352] Table A1 provides a list of nucleic acid sequences related to SEQ ID NO: 1 and SEQ ID NO: 2.

TABLE A1
Examples of HhH-GPD-related nucleic acids and polypeptides:

| | Nucleic | Protein |
|---|---|---|
| | acid SEQ | SEQ ID |
| Plant Source | ID NO: | NO: |
| HhH-GPD-related polypeptide | 1 | 2 |
| P.trichocarpa_643115#1 | 3 | 4 |
| A.lyrata_476667#1 | 5 | 6 |
| A.lyrata_485440#1 | 7 | 8 |
| A.thaliana_AT1G19480.1#1 | 9 | 10 |
| A.thaliana_AT1G75230.2#1 | 11 | 12 |
| A.thaliana_AT3G50880.1#1 | 13 | 14 |
| B.napus_BN06MC32284_51450890@32143#1 | 15 | 16 |
| B.napus_TC100073#1 | 17 | 18 |
| B.napus_TC96777#1 | 19 | 20 |
| C.clementina_DY278933#1 | 21 | 22 |
| C.clementina_DY290767#1 | 23 | 24 |
| C.clementina_TC10904#1 | 25 | 26 |
| C.clementina_TC22879#1 | 27 | 28 |
| G.hirsutum_TC146266#1 | 29 | 30 |
| G.hirsutum_TC146317#1 | 31 | 32 |
| G.max_Glyma04g03390.1#1 | 33 | 34 |
| G.max_Glyma06g03470.1#1 | 35 | 36 |
| M.domestica_TC33844#1 | 37 | 38 |
| M.domestica_TC49396#1 | 39 | 40 |
| M.truncatula_CU137661_26.4#1 | 41 | 42 |
| N.benthamiana_TC12579#1 | 43 | 44 |
| N.tabacum_TC48789#1 | 45 | 46 |
| O.sativa_LOC_Os05g49250.1#1 | 47 | 48 |
| O.sativa_LOC_Os05g50290.1#1 | 49 | 50 |
| P.patens_TC39506#1 | 51 | 52 |
| P.trifoliata_TA5456_37690#1 | 53 | 54 |
| R.communis_TA2917_3988#1 | 55 | 56 |
| S.bicolor_Sb09g028800.1#1 | 57 | 58 |
| S.bicolor_Sb09g029530.1#1 | 59 | 60 |
| S.tuberosum_TC194300#1 | 61 | 62 |
| T.cacao_TC16262#1 | 63 | 64 |
| V.vinifera_GSVIVT00036375001#1 | 65 | 66 |
| Z.mays_TC461142#1 | 67 | 68 |
| Zea_mays_GRMZM2G029974_T01#1 | 69 | 70 |
| Zea_mays_GRMZM2G117574_T01#1 | 71 | 72 |

### 2. Calnexin-Related Polypeptides

[0353] Sequences (full length cDNA, ESTs or genomic) related to SEQ ID NO: 80 and SEQ ID NO: 81 were identified amongst those maintained in the Entrez Nucleotides database at the National Center for Biotechnology Information (NCBI) using database sequence search tools, such as the Basic Local Alignment Tool (BLAST) (Altschul et al. (1990) J. Mol. Biol. 215:403-410; and Altschul et al. (1997) Nucleic Acids Res. 25:3389-3402). The program is used to find regions of local similarity between sequences by comparing nucleic acid or polypeptide sequences to sequence databases and by calculating the statistical significance of matches. For example, the polypeptide encoded by the nucleic acid of SEQ ID NO: 80 was used for the TBLASTN algorithm, with default settings and the filter to ignore low complexity sequences set off. The output of the analysis was viewed by pairwise comparison, and ranked according to the probability score (E-value), where the score reflect the probability that a particular alignment occurs by chance (the lower the E-value, the more significant the hit). In addition to E-values, comparisons were also scored by percentage identity. Percentage identity refers to the number of identical nucleotides (or amino acids) between the two compared nucleic acid (or polypeptide) sequences over a particular length. In some instances, the default parameters may be adjusted to modify the stringency of the search. For example the E-value may be increased to show less stringent matches. This way, short nearly exact matches may be identified.

[0354] Table A2 provides a list of nucleic acid sequences related to SEQ ID NO: 80 and SEQ ID NO: 81.

TABLE A2
Examples of calnexin-related nucleic acids and polypeptides:

| | Nucleic | Protein |
|---|---|---|
| | acid SEQ | SEQ ID |
| Plant source | ID NO: | NO: |
| PtCalnexin | 80 | 81 |
| A.lyrata_471010#1 | 82 | 83 |
| A.lyrata_496347#1 | 84 | 85 |
| A.lyrata_914924#1 | 86 | 87 |
| A.lyrata_919589#1 | 88 | 89 |
| A.lyrata_919674#1 | 90 | 91 |
| A.thaliana_AT1G08450.1#1 | 92 | 93 |
| A.thaliana_AT1G09210.1#1 | 94 | 95 |
| A.thaliana_AT1G56340.1#1 | 96 | 97 |
| A.thaliana_AT5G07340.1#1 | 98 | 99 |
| A.thaliana_AT5G61790.1#1 | 100 | 101 |
| B.distachyon_TA448_15368#1 | 102 | 103 |
| B.napus_BN06MC00313_51308861@312#1 | 104 | 105 |
| B.napus_BN06MC12231_43401506@12197#1 | 106 | 107 |
| B.napus_BN06MC28594_51341156@28478#1 | 108 | 109 |
| B.napus_TC63412#1 | 110 | 111 |
| B.napus_TC63454#1 | 112 | 113 |
| B.napus_TC68171#1 | 114 | 115 |
| B.napus_TC72974#1 | 116 | 117 |
| B.vulgaris_TA7257_161934#1 | 118 | 119 |
| C.annuum_TC13486#1 | 120 | 121 |
| C.maculosa_TA1118_215693#1 | 122 | 123 |
| C.maculosa_TA223_215693#1 | 124 | 125 |
| C.reinhardtii_78954#1 | 126 | 127 |
| C.solstitialis_TA9_347529#1 | 128 | 129 |
| C.tinctorius_TA715_4222#1 | 130 | 131 |
| C.vulgaris_30353#1 | 132 | 133 |
| E.esula_TC7039#1 | 134 | 135 |
| F.vesca_TA8708_57918#1 | 136 | 137 |
| G.hirsutum_TC133298#1 | 138 | 139 |
| G.hirsutum_TC150252#1 | 140 | 141 |
| G.hirsutum_TC159091#1 | 142 | 143 |
| G.max_Glyma04g38000.1#1 | 144 | 145 |
| G.max_Glyma05g33330.1#1 | 146 | 147 |
| G.max_Glyma06g17060.1#1 | 148 | 149 |
| G.max_Glyma08g00920.1#1 | 150 | 151 |
| G.max_Glyma09g38410.1#1 | 152 | 153 |
| G.max_Glyma10g28890.1#1 | 154 | 155 |
| G.max_Glyma20g23080.2#1 | 156 | 157 |
| G.max_GM06MC27029_sad43d09@26416#1 | 158 | 159 |
| G.max_GM06MC38977_59771180@22151#1 | 160 | 161 |
| G.max_GM06MC39446_sm65a10@38275#1 | 162 | 163 |
| G.max_TC277858#1 | 164 | 165 |
| G.max_TC317043#1 | 166 | 167 |
| G.max_TC318295#1 | 168 | 169 |
| G.raimondii_TC2006#1 | 170 | 171 |
| G.raimondii_TC2415#1 | 172 | 173 |
| H.vulgare_gi_24272515#1 | 174 | 175 |
| I.nil_TC4374#1 | 176 | 177 |
| L.sativa_TC16142#1 | 178 | 179 |
| L.sativa_TC19016#1 | 180 | 181 |
| M.domestica_TC42217#1 | 182 | 183 |
| M.domestica_TC49179#1 | 184 | 185 |
| M.truncatula_AC139708_17.5#1 | 186 | 187 |
| M.truncatula_AC141864_23.4#1 | 188 | 189 |
| M.truncatula_AC147179_22.4#1 | 190 | 191 |
| N.tabacum_TC43844#1 | 192 | 193 |
| O.basilicum_TA646_39350#1 | 194 | 195 |
| O.sativa_LOC_Os03g61670.1#1 | 196 | 197 |
| O.sativa_LOC_Os04g32950.1#1 | 198 | 199 |
| P.patens_164102#1 | 200 | 201 |
| P.patens_TC30649#1 | 202 | 203 |
| P.pinaster_TA4383_71647#1 | 204 | 205 |
| P.sativum_Y17329#1 | 206 | 207 |
| P.sitchensis_TA12246_3332#1 | 208 | 209 |
| P.trichocarpa_562210#1 | 210 | 211 |
| P.trichocarpa_733819#1 | 212 | 213 |
| P.trichocarpa_823453#1 | 214 | 215 |
| P.trifoliata_TA7309_37690#1 | 216 | 217 |
| P.vulgaris_TC13909#1 | 218 | 219 |
| S.bicolor_Sb06g015020.1#1 | 220 | 221 |
| S.habrochaites_TA1435_62890#1 | 222 | 223 |
| S.lycopersicum_TC191445#1 | 224 | 225 |
| S.moellendorffii_144212#1 | 226 | 227 |
| S.moellendorffii_89431#1 | 228 | 229 |
| S.tuberosum_TC167880#1 | 230 | 231 |
| T.aestivum_TC278186#1 | 232 | 233 |
| T.cacao_TC1957#1 | 234 | 235 |
| Triphysaria_sp_TC12183#1 | 236 | 237 |
| Triphysaria_sp_TC6112#1 | 238 | 239 |
| V.vinifera_GSVIVT00006229001#1 | 240 | 241 |
| V.vinifera_GSVIVT00011650001#1 | 242 | 243 |
| Z.mays_c68527590gm030403@11453#1 | 244 | 245 |
| Z.mays_TC531159#1 | 246 | 247 |
| Z.mays_ZM07MC30376_BFb0142F15@30285#1 | 248 | 249 |
| Z.mays_ZM07MC36343_BFb0029B07@36220#1 | 250 | 251 |
| Zea_mays_GRMZM2G022180_T02#1 | 252 | 253 |

[0355] Sequences have been tentatively assembled and publicly disclosed by research institutions, such as The Institute for Genomic Research (TIGR; beginning with TA). For instance, the Eukaryotic Gene Orthologs (EGO) database may be used to identify such related sequences, either by keyword search or by using the BLAST algorithm with the nucleic acid sequence or polypeptide sequence of interest. Special nucleic acid sequence databases have been created for particular organisms, e.g. for certain prokaryotic organisms, such as by the Joint Genome Institute. Furthermore, access to proprietary databases, has allowed the identification of novel nucleic acid and polypeptide sequences.

### Example 2

### Alignment of Sequences to the Polypeptide Sequences Used in the Methods of the Invention

### 1. HhH-GPD-Related Polypeptides

[0356] Alignment of the polypeptide sequences was performed using the ClustalW 2.0 algorithm of progressive alignment (Thompson et al. (1997) Nucleic Acids Res 25:4876-4882; Chenna et al. (2003). Nucleic Acids Res 31:3497-3500) with standard setting (slow alignment, similarity matrix: Gonnet, gap opening penalty 10, gap extension penalty: 0.2). Minor manual editing was done to further optimise the alignment. The HhH-GPD-related polypeptides are aligned in FIG. 2.

### 2. Calnexin-Related Polypeptides

[0357] Alignment of the polypeptide sequences was performed using the ClustalW 2.0 algorithm of progressive alignment (Thompson et al. (1997) Nucleic Acids Res 25:4876-4882; Chenna et al. (2003). Nucleic Acids Res 31:3497-3500) with standard setting (slow alignment, similarity matrix: Gonnet, gap opening penalty 10, gap extension penalty: 0.2). Minor manual editing was done to further optimise the alignment. The calnexin-related polypeptides are aligned in FIG. 8.

### Example 3

### Calculation of Global Percentage Identity Between Polypeptide Sequences

[0358] Global percentages of similarity and identity between full length polypeptide sequences useful in performing the methods of the invention were determined using MatGAT (Matrix Global Alignment Tool) software (BMC Bioinformatics. 2003 4:29. MatGAT: an application that generates similarity/identity matrices using protein or DNA sequences. Campanella J J, Bitincka L, Smalley J; software hosted by Ledion Bitincka). MatGAT generates similarity/identity matrices for DNA or protein sequences without needing pre-alignment of the data. The program performs a series of pair-wise alignments using the Myers and Miller global alignment algorithm, calculates similarity and identity, and then places the results in a distance matrix.

### 1. HhH-GPD-Related Polypeptides

[0359] Results of the MatGAT analysis are shown in FIG. 3 with global similarity and identity percentages over the full length of the polypeptide sequences. Sequence similarity is shown in the bottom half of the dividing line and sequence identity is shown in the top half of the diagonal dividing line. Parameters used in the analysis were: Scoring matrix: Blosum62, First Gap: 12, Extending Gap: 2. The sequence identity (in %) between the HhH-GPD-related polypeptide sequences useful in performing the methods of the invention can be as low as 31% compared to SEQ ID NO: 2.

### 2. Calnexin-Related Polypeptides

[0360] Results of the MatGAT analysis are shown in FIG. 7 with global similarity and identity percentages over the full length of the polypeptide sequences. Sequence similarity is shown in the bottom half of the dividing line and sequence identity is shown in the top half of the diagonal dividing line. Parameters used in the analysis were: Scoring matrix: Blosum62, First Gap: 12, Extending Gap: 2. The sequence identity (in %) between the calnexin-related polypeptide sequences useful in performing the methods of the invention can be as low as 55% compared to SEQ ID NO: 81.

[0361] Like for full length sequences, a MATGAT table based on subsequences of a specific domain, may be generated. Based on a multiple alignment of calnexin-related polypeptides, such as for example the one of Example 2, a skilled person may select conserved sequences and submit as input for a MaTGAT analysis. This approach is useful where overall sequence conservation among calnexin-related proteins is rather low.

### Example 4

### Identification of Domains Comprised in Polypeptide Sequences Useful in Performing the Methods of the Invention

[0362] The Integrated Resource of Protein Families, Domains and Sites (InterPro) database is an integrated interface for the commonly used signature databases for text- and sequence-based searches. The InterPro database combines these databases, which use different methodologies and varying degrees of biological information about well-characterized proteins to derive protein signatures. Collaborating databases include SWISS-PROT, PROSITE, TrEMBL, PRINTS, ProDom and Pfam, Smart and TIGRFAMs. Pfam is a large collection of multiple sequence alignments and hidden Markov models covering many common protein domains and families. Pfam is hosted at the Sanger Institute server in the United Kingdom. Interpro is hosted at the European Bioinformatics Institute in the United Kingdom.

### 1. HhH-GPD-Related Polypeptides

[0363] The results of the InterPro scan (InterPro database, release 34.0) of the polypeptide sequence as represented by SEQ ID NO: 2 are presented in Table B1.

TABLE B1
InterPro scan results (major accession numbers) of the
polypeptide sequence as represented by SEQ ID NO: 2.

| Method | Accession | Domain | start | stop | E-value |
|---|---|---|---|---|---|
| Gene3D | G3DSA: | Helix-turn-helix | 275 | 327 | 2.80E−16 |
| | 1.10.1670.10 | (IPR023170) | | | |
| SUPER- | SSF48150 | DNA glycosylase | 150 | 326 | 5.30E−38 |
| FAMILY | | (IPR011257) | | | |
| HMMPfam | PF00730 | HhH-GPD | 169 | 313 | 1.10E−18 |
| | | (IPR003265) | | | |

[0364] In an embodiment a HhH-GPD-related polypeptide comprises a conserved domain (or motif) with at least 70%, 71%, 72%, 73%, 74%, 75%, 76%, 77%, 78%, 79%, 80%, 81%, 82%, 83%, 84%, 85%, 86%, 87%, 88%, 89%, 90%, 91%, 92%, 93%, 94%, 95%, 96%, 97%, 98%, or 99% sequence identity to a conserved domain from amino acid 169 to 313 in SEQ ID NO: 2).

### 2. Calnexin-Related Polypeptides

[0365] The results of the InterPro scan (InterPro database, release 34.0) of the polypeptide sequence as represented by SEQ ID NO: 81 are presented in Table B2.

TABLE B2
InterPro scan results (major accession numbers) of the polypeptide sequence as represented by SEQ ID NO: 81.

| InterPro | Method | Accession | Domain | start | stop | E-value |
|---|---|---|---|---|---|---|
| IPR001580 | FPrintScan | PR00626 | Calreticulin | 104 | 122 | 2.1e−49 |
| | | | | 133 | 149 | 2.1e−49 |
| | | | | 231 | 244 | 2.1e−49 |
| | | | | 279 | 301 | 2.1e−49 |
| | | | | 336 | 355 | 2.1e−49 |
| | | | | 368 | 388 | 2.1e−49 |
| | HMMPanther | PTHR11073 | FAMILY NOT NAMED | 8 | 524 | 7.2e−175 |
| | HMMPfam | PF00262 | Calreticulin | 32 | 387 | 3.7e−137 |
| IPR008985 | superfamily | SSF49899 | Concanavalin A-like lectin/glucanase | 22 | 254 | 2.2e−48 |
| | | | | 359 | 404 | 8.0e−07 |
| IPR009033 | Gene3D | G3DSA: 2.10.250. 10 | Calreticulin/calnexin, P | 260 | 316 | 1.9e−15 |
| | | | | 317 | 357 | 3.3e−15 |
| | superfamily | SSF63887 | P-domain of calnexin/calreticulin | 217 | 358 | 2.5e−56 |
| IPR013320 | Gene3D | G3DSA: 2.60.120.200 | Concanavalin A-like lectin/glucanase | 27 | 257 | 1.1e−76 |
| IPR018124 | PatternScan | PS00804 | CALRETICULIN_2 | 137 | 145 | — |
| | PatternScan | PS00805 | CALRETICULIN_REPEAT | 279 | 291 | — |
| | | | | 224 | 236 | — |
| | | | | 241 | 253 | — |
| NULL | SignalPHMM | NULL | SignalP-NN(euk)signal-peptide | 1 | 27 | — |
| | TMHMM | tmhmm | transmembrane_regions | 9 | 27 | — |
| | | | | 466 | 486 | — |

[0366] In one embodiment a calnexin-related polypeptide comprises a conserved domain (or motif) with at least 70%, 71%, 72%, 73%, 74%, 75%, 76%, 77%, 78%, 79%, 80%, 81%, 82%, 83%, 84%, 85%, 86%, 87%, 88%, 89%, 90%, 91%, 92%, 93%, 94%, 95%, 96%, 97%, 98%, or 99% sequence identity to a conserved domain from amino acid 8 to 524 in SEQ ID NO: 81).

### Example 5

### Topology Prediction of the Polypeptide Sequences Useful in Performing the Methods of the Invention

[0367] TargetP 1.1 predicts the subcellular location of eukaryotic proteins. The location assignment is based on the predicted presence of any of the N-terminal pre-sequences: chloroplast transit peptide (cTP), mitochondrial targeting peptide (mTP) or secretory pathway signal peptide (SP). Scores on which the final prediction is based are not really probabilities, and they do not necessarily add to one. However, the location with the highest score is the most likely according to TargetP, and the relationship between the scores (the reliability class) may be an indication of how certain the prediction is. The reliability class (RC) ranges from 1 to 5, where 1 indicates the strongest prediction. For the sequences predicted to contain an N-terminal presequence a potential cleavage site can also be predicted. TargetP is maintained at the server of the Technical University of Denmark.

[0368] A number of parameters must be selected before analysing a sequence, such as organism group (non-plant or plant), cutoff sets (none, predefined set of cutoffs, or user-specified set of cutoffs), and the calculation of prediction of cleavage sites (yes or no).

### HhH-GPD-Related Polypeptides

[0369] The results of TargetP 1.1 analysis of the polypeptide sequence as represented by SEQ ID NO: 2 are presented Table C1. The “plant” organism group has been selected, no cutoffs defined, and the predicted length of the transit peptide requested. The subcellular localization of the polypeptide sequence as represented by SEQ ID NO: 2 may be the cytoplasm or nucleus, no transit peptide is predicted.

TABLE C1
TargetP 1.1 analysis of the polypeptide
sequence as represented by SEQ ID NO: 2

| | |
|---|---|
| Length (AA) | 374 |
| Chloroplastic transit peptide | 0.449 |
| Mitochondrial transit peptide | 0.148 |
| Secretory pathway signal peptide | 0.002 |
| Other subcellular targeting | 0.320 |
| Predicted Location | / |
| Reliability class | 5 |
| Predicted transit peptide length | / |

[0370] Many other algorithms can be used to perform such analyses, including:
[0371] ChloroP 1.1 hosted on the server of the Technical University of Denmark;
[0372] Protein Prowler Subcellular Localisation Predictor version 1.2 hosted on the server of the Institute for Molecular Bioscience, University of Queensland, Brisbane, Australia;
[0373] PENCE Proteome Analyst PA-GOSUB 2.5 hosted on the server of the University of Alberta, Edmonton, Alberta, Canada;
[0374] TMHMM, hosted on the server of the Technical University of Denmark
[0375] PSORT (URL: psort.org)
[0376] PLOC (Park and Kanehisa, Bioinformatics, 19, 1656-1663, 2003).

### Example 6

### Functional Assay Related to the Polypeptide Sequences Useful in Performing the Methods of the Invention

### HhH-GPD-Related Polypeptides

[0377] For example, an assay for measuring the functional (biological) activity as mentioned herein above is described by Córdoba-Cañero et al., 2009.

### Example 7

### Cloning of the Nucleic Acid Sequence Used in Methods of the Invention

### 1. HhH-GPD-Related Polypeptides

[0378] The nucleic acid sequence was amplified by PCR using as template a custom-made Populus trichocarpa seedlings cDNA library. PCR was performed using a commercially available proofreading Taq DNA polymerase in standard conditions, using 200 ng of template in a 50 μl PCR mix. The primers used were prm13988 (SEQ ID NO: 77; sense, start codon in bold): 5′-ggggacaagtttgtacaaaaaagcaggcttaaacaatgggcgaacaaaccaaa-3′ and prm13989 (SEQ ID NO: 78; reverse, complementary): 5′-ggggaccactttgtacaagaaagctgggt ctcctcatcctaggtcccaat-3′, which include the AttB sites for Gateway recombination. The amplified PCR fragment was purified also using standard methods. The first step of the Gateway procedure, the BP reaction, was then performed, during which the PCR fragment recombined in vivo with the pDONR201 plasmid to produce, according to the Gateway terminology, an “entry clone”, pHhH-GPD-related polypeptide. Plasmid pDONR201 was purchased from Invitrogen, as part of the Gateway® technology.

[0379] The entry clone comprising SEQ ID NO: 1 was then used in an LR reaction with a destination vector used for Oryza sativa transformation. This vector contained as functional elements within the T-DNA borders: a plant selectable marker; a screenable marker expression cassette; and a Gateway cassette intended for LR in vivo recombination with the nucleic acid sequence of interest already cloned in the entry clone. A rice GOS2 promoter (SEQ ID NO: 76) for constitutive expression was located upstream of this Gateway cassette.

[0380] After the LR recombination step, the resulting expression vector pGOS2::HhH-GPD (FIG. 4) was transformed into Agrobacterium strain LBA4044 according to methods well known in the art.

### 2. Calnexin-Related Polypeptides

[0381] The nucleic acid sequence was amplified by PCR using as template a custom-made Populus trichocarpa seedlings cDNA library. PCR was performed using a commercially available proofreading Taq DNA polymerase in standard conditions, using 200 ng of template in a 50 μl PCR mix. The primers used were prm17919 (SEQ ID NO: 257; sense, start codon in bold): 5′-ggggacaagtttgtacaaaaaagcaggcttaaacaatgagagaagcgaaacgtatc-3′ and prm17920 (SEQ ID NO: 258; reverse, complementary): 5′-ggggaccactttgtacaagaa agctgggtccctctgatctcatctttcag-3′, which include the AttB sites for Gateway recombination. The amplified PCR fragment was purified also using standard methods. The first step of the Gateway procedure, the BP reaction, was then performed, during which the PCR fragment recombined in vivo with the pDONR201 plasmid to produce, according to the Gateway terminology, an “entry clone”, calnexin-related gene. Plasmid pDONR201 was purchased from Invitrogen, as part of the Gateway® technology.

[0382] The entry clone comprising SEQ ID NO: 80 was then used in an LR reaction with a destination vector used for Oryza sativa transformation. This vector contained as functional elements within the T-DNA borders: a plant selectable marker; a screenable marker expression cassette; and a Gateway cassette intended for LR in vivo recombination with the nucleic acid sequence of interest already cloned in the entry clone. A rice GOS2 promoter (SEQ ID NO: 259) for constitutive expression was located upstream of this Gateway cassette.

[0383] After the LR recombination step, the resulting expression vector pGOS2::calnexin-related gene (FIG. 6) was transformed into Agrobacterium strain LBA4044 according to methods well known in the art.

### Example 8

### Plant Transformation

### Rice Transformation

[0384] The Agrobacterium containing the expression vector was used to transform Oryza sativa plants. Mature dry seeds of the rice japonica cultivar Nipponbare were dehusked. Sterilization was carried out by incubating for one minute in 70% ethanol, followed by 30 to 60 minutes, preferably 30 minutes in sodium hypochlorite solution (depending on the grade of contamination), followed by a 3 to 6 times, preferably 4 time wash with sterile distilled water. The sterile seeds were then germinated on a medium containing 2,4-D (callus induction medium). After incubation in light for 6 days scutellum-derived calli is transformed with Agrobacterium as described herein below.

[0385] Agrobacterium strain LBA4404 containing the expression vector was used for co-cultivation. Agrobacterium was inoculated on AB medium with the appropriate antibiotics and cultured for 3 days at 28° C. The bacteria were then collected and suspended in liquid co-cultivation medium to a density (OD600) of about 1. The calli were immersed in the suspension for 1 to 15 minutes. The callus tissues were then blotted dry on a filter paper and transferred to solidified, co-cultivation medium and incubated for 3 days in the dark at 25° C. After washing away the Agrobacterium, the calli were grown on 2,4-D-containing medium for 10 to 14 days (growth time for indica: 3 weeks) under light at 28° C.-32° C. in the presence of a selection agent. During this period, rapidly growing resistant callus developed. After transfer of this material to regeneration media, the embryogenic potential was released and shoots developed in the next four to six weeks. Shoots were excised from the calli and incubated for 2 to 3 weeks on an auxin-containing medium from which they were transferred to soil. Hardened shoots were grown under high humidity and short days in a greenhouse.

[0386] Transformation of rice cultivar indica can also be done in a similar way as give above according to techniques well known to a skilled person.

[0387] 35 to 90 independent T0 rice transformants were generated for one construct. The primary transformants were transferred from a tissue culture chamber to a greenhouse. After a quantitative PCR analysis to verify copy number of the T-DNA insert, only single copy transgenic plants that exhibit tolerance to the selection agent were kept for harvest of T1 seed. Seeds were then harvested three to five months after transplanting. The method yielded single locus transformants at a rate of over 50% (Aldemita and Hodges 1996, Chan et al. 1993, Hiei et al. 1994).

### Example 9

### Transformation of Other Crops

### Corn Transformation

[0388] Transformation of maize (Zea mays) is performed with a modification of the method described by Ishida et al. (1996) Nature Biotech 14(6): 745-50. Transformation is genotype-dependent in corn and only specific genotypes are amenable to transformation and regeneration. The inbred line A188 (University of Minnesota) or hybrids with A188 as a parent are good sources of donor material for transformation, but other genotypes can be used successfully as well. Ears are harvested from corn plant approximately 11 days after pollination (DAP) when the length of the immature embryo is about 1 to 1.2 mm. Immature embryos are cocultivated with Agrobacterium tumefaciens containing the expression vector, and transgenic plants are recovered through organogenesis. Excised embryos are grown on callus induction medium, then maize regeneration medium, containing the selection agent (for example imidazolinone but various selection markers can be used). The Petri plates are incubated in the light at 25° C. for 2-3 weeks, or until shoots develop. The green shoots are transferred from each embryo to maize rooting medium and incubated at 25° C. for 2-3 weeks, until roots develop. The rooted shoots are transplanted to soil in the greenhouse. T1 seeds are produced from plants that exhibit tolerance to the selection agent and that contain a single copy of the T-DNA insert.

### Wheat Transformation

[0389] Transformation of wheat is performed with the method described by Ishida et al. (1996) Nature Biotech 14(6): 745-50. The cultivar Bobwhite (available from CIMMYT, Mexico) is commonly used in transformation. Immature embryos are co-cultivated with Agrobacterium tumefaciens containing the expression vector, and transgenic plants are recovered through organogenesis. After incubation with Agrobacterium, the embryos are grown in vitro on callus induction medium, then regeneration medium, containing the selection agent (for example imidazolinone but various selection markers can be used). The Petri plates are incubated in the light at 25° C. for 2-3 weeks, or until shoots develop. The green shoots are transferred from each embryo to rooting medium and incubated at 25° C. for 2-3 weeks, until roots develop. The rooted shoots are transplanted to soil in the greenhouse. T1 seeds are produced from plants that exhibit tolerance to the selection agent and that contain a single copy of the T-DNA insert.

### Soybean Transformation

[0390] Soybean is transformed according to a modification of the method described in the Texas A&M patent U.S. Pat. No. 5,164,310. Several commercial soybean varieties are amenable to transformation by this method. The cultivar Jack (available from the Illinois Seed foundation) is commonly used for transformation. Soybean seeds are sterilised for in vitro sowing. The hypocotyl, the radicle and one cotyledon are excised from seven-day old young seedlings. The epicotyl and the remaining cotyledon are further grown to develop axillary nodes. These axillary nodes are excised and incubated with Agrobacterium tumefaciens containing the expression vector. After the cocultivation treatment, the explants are washed and transferred to selection media. Regenerated shoots are excised and placed on a shoot elongation medium. Shoots no longer than 1 cm are placed on rooting medium until roots develop. The rooted shoots are transplanted to soil in the greenhouse. T1 seeds are produced from plants that exhibit tolerance to the selection agent and that contain a single copy of the T-DNA insert.

### Rapeseed/Canola Transformation

[0391] Cotyledonary petioles and hypocotyls of 5-6 day old young seedling are used as explants for tissue culture and transformed according to Babic et al. (1998, Plant Cell Rep 17: 183-188). The commercial cultivar Westar (Agriculture Canada) is the standard variety used for transformation, but other varieties can also be used. Canola seeds are surface-sterilized for in vitro sowing. The cotyledon petiole explants with the cotyledon attached are excised from the in vitro seedlings, and inoculated with Agrobacterium (containing the expression vector) by dipping the cut end of the petiole explant into the bacterial suspension. The explants are then cultured for 2 days on MSBAP-3 medium containing 3 mg/l BAP, 3% sucrose, 0.7 Phytagar at 23° C., 16 hr light. After two days of co-cultivation with Agrobacterium, the petiole explants are transferred to MSBAP-3 medium containing 3 mg/l BAP, cefotaxime, carbenicillin, or timentin (300 mg/l) for 7 days, and then cultured on MSBAP-3 medium with cefotaxime, carbenicillin, or timentin and selection agent until shoot regeneration. When the shoots are 5-10 mm in length, they are cut and transferred to shoot elongation medium (MSBAP-0.5, containing 0.5 mg/l BAP). Shoots of about 2 cm in length are transferred to the rooting medium (MS0) for root induction. The rooted shoots are transplanted to soil in the greenhouse. T1 seeds are produced from plants that exhibit tolerance to the selection agent and that contain a single copy of the T-DNA insert.

### Alfalfa Transformation

[0392] A regenerating clone of alfalfa (Medicago sativa) is transformed using the method of (McKersie et al., 1999 Plant Physiol 119: 839-847). Regeneration and transformation of alfalfa is genotype dependent and therefore a regenerating plant is required. Methods to obtain regenerating plants have been described. For example, these can be selected from the cultivar Rangelander (Agriculture Canada) or any other commercial alfalfa variety as described by Brown DCW and A Atanassov (1985. Plant Cell Tissue Organ Culture 4: 111-112). Alternatively, the RA3 variety (University of Wisconsin) has been selected for use in tissue culture (Walker et al., 1978 Am J Bot 65:654-659). Petiole explants are cocultivated with an overnight culture of Agrobacterium tumefaciens C58C1 pMP90 (McKersie et al., 1999 Plant Physiol 119: 839-847) or LBA4404 containing the expression vector. The explants are cocultivated for 3 d in the dark on SH induction medium containing 288 mg/L Pro, 53 mg/L thioproline, 4.35 g/L K2SO4, and 100 μm acetosyringinone. The explants are washed in half-strength Murashige-Skoog medium (Murashige and Skoog, 1962) and plated on the same SH induction medium without acetosyringinone but with a suitable selection agent and suitable antibiotic to inhibit Agrobacterium growth. After several weeks, somatic embryos are transferred to BOi2Y development medium containing no growth regulators, no antibiotics, and 50 g/L sucrose. Somatic embryos are subsequently germinated on half-strength Murashige-Skoog medium. Rooted seedlings were transplanted into pots and grown in a greenhouse. T1 seeds are produced from plants that exhibit tolerance to the selection agent and that contain a single copy of the T-DNA insert.

### Cotton Transformation

[0393] Cotton is transformed using Agrobacterium tumefaciens according to the method described in U.S. Pat. No. 5,159,135. Cotton seeds are surface sterilised in 3% sodium hypochlorite solution during 20 minutes and washed in distilled water with 500 μg/ml cefotaxime. The seeds are then transferred to SH-medium with 50 μg/ml benomyl for germination. Hypocotyls of 4 to 6 days old seedlings are removed, cut into 0.5 cm pieces and are placed on 0.8% agar. An Agrobacterium suspension (approx. 108 cells per ml, diluted from an overnight culture transformed with the gene of interest and suitable selection markers) is used for inoculation of the hypocotyl explants. After 3 days at room temperature and lighting, the tissues are transferred to a solid medium (1.6 g/l Gelrite) with Murashige and Skoog salts with B5 vitamins (Gamborg et al., Exp. Cell Res. 50:151-158 (1968)), 0.1 mg/l 2,4-D, 0.1 mg/l 6-furfurylaminopurine and 750 μg/ml MgCL2, and with 50 to 100 μg/ml cefotaxime and 400-500 μg/ml carbenicillin to kill residual bacteria. Individual cell lines are isolated after two to three months (with subcultures every four to six weeks) and are further cultivated on selective medium for tissue amplification (30° C., 16 hr photoperiod). Transformed tissues are subsequently further cultivated on non-selective medium during 2 to 3 months to give rise to somatic embryos. Healthy looking embryos of at least 4 mm length are transferred to tubes with SH medium in fine vermiculite, supplemented with 0.1 mg/l indole acetic acid, 6 furfurylaminopurine and gibberellic acid. The embryos are cultivated at 30° C. with a photoperiod of 16 hrs, and plantlets at the 2 to 3 leaf stage are transferred to pots with vermiculite and nutrients. The plants are hardened and subsequently moved to the greenhouse for further cultivation.

### Sugarbeet Transformation

[0394] Seeds of sugarbeet (Beta vulgaris L.) are sterilized in 70% ethanol for one minute followed by 20 min. shaking in 20% Hypochlorite bleach e.g. Clorox® regular bleach (commercially available from Clorox, 1221 Broadway, Oakland, Calif. 94612, USA). Seeds are rinsed with sterile water and air dried followed by plating onto germinating medium (Murashige and Skoog (MS) based medium (Murashige, T., and Skoog., 1962. Physiol. Plant, vol. 15, 473-497) including B5 vitamins (Gamborg et al.; Exp. Cell Res., vol. 50, 151-8.) supplemented with 10 g/l sucrose and 0.8% agar). Hypocotyl tissue is used essentially for the initiation of shoot cultures according to Hussey and Hepher (Hussey, G., and Hepher, A., 1978. Annals of Botany, 42, 477-9) and are maintained on MS based medium supplemented with 30 g/l sucrose plus 0.25 mg/l benzylamino purine and 0.75% agar, pH 5.8 at 23-25° C. with a 16-hour photoperiod. Agrobacterium tumefaciens strain carrying a binary plasmid harbouring a selectable marker gene, for example nptII, is used in transformation experiments. One day before transformation, a liquid LB culture including antibiotics is grown on a shaker (28° C., 150 rpm) until an optical density (O.D.) at 600 nm of ˜1 is reached. Overnight-grown bacterial cultures are centrifuged and resuspended in inoculation medium (O.D. ˜1) including Acetosyringone, pH 5,5. Shoot base tissue is cut into slices (1.0 cm×1.0 cm×2.0 mm approximately). Tissue is immersed for 30 s in liquid bacterial inoculation medium. Excess liquid is removed by filter paper blotting. Co-cultivation occurred for 24-72 hours on MS based medium incl. 30 g/l sucrose followed by a non-selective period including MS based medium, 30 g/l sucrose with 1 mg/l BAP to induce shoot development and cefotaxim for eliminating the Agrobacterium. After 3-10 days explants are transferred to similar selective medium harbouring for example kanamycin or G418 (50-100 mg/l genotype dependent). Tissues are transferred to fresh medium every 2-3 weeks to maintain selection pressure. The very rapid initiation of shoots (after 3-4 days) indicates regeneration of existing meristems rather than organogenesis of newly developed transgenic meristems. Small shoots are transferred after several rounds of subculture to root induction medium containing 5 mg/l NAA and kanamycin or G418. Additional steps are taken to reduce the potential of generating transformed plants that are chimeric (partially transgenic). Tissue samples from regenerated shoots are used for DNA analysis. Other transformation methods for sugarbeet are known in the art, for example those by Linsey & Gallois (Linsey, K., and Gallois, P., 1990. Journal of Experimental Botany; vol. 41, No. 226; 529-36) or the methods published in the international application published as WO9623891A.

### Sugarcane Transformation

[0395] Spindles are isolated from 6-month-old field grown sugarcane plants (Arencibia et al., 1998. Transgenic Research, vol. 7, 213-22; Enriquez-Obregon et al., 1998. Planta, vol. 206, 20-27). Material is sterilized by immersion in a 20% Hypochlorite bleach e.g. Clorox® regular bleach (commercially available from Clorox, 1221 Broadway, Oakland, Calif. 94612, USA) for 20 minutes. Transverse sections around 0.5 cm are placed on the medium in the top-up direction. Plant material is cultivated for 4 weeks on MS (Murashige, T., and Skoog., 1962. Physiol. Plant, vol. 15, 473-497) based medium incl. B5 vitamins (Gamborg, 0., et al., 1968. Exp. Cell Res., vol. 50, 151-8) supplemented with 20 g/l sucrose, 500 mg/l casein hydrolysate, 0.8% agar and 5 mg/l 2,4-D at 23° C. in the dark. Cultures are transferred after 4 weeks onto identical fresh medium. Agrobacterium tumefaciens strain carrying a binary plasmid harbouring a selectable marker gene, for example hpt, is used in transformation experiments. One day before transformation, a liquid LB culture including antibiotics is grown on a shaker (28° C., 150 rpm) until an optical density (O.D.) at 600 nm of ˜0.6 is reached. Overnight-grown bacterial cultures are centrifuged and resuspended in MS based inoculation medium (O.D. ˜0.4) including acetosyringone, pH 5,5. Sugarcane embryogenic callus pieces (2-4 mm) are isolated based on morphological characteristics as compact structure and yellow colour and dried for 20 min. in the flow hood followed by immersion in a liquid bacterial inoculation medium for 10-20 minutes. Excess liquid is removed by filter paper blotting. Co-cultivation occurred for 3-5 days in the dark on filter paper which is placed on top of MS based medium incl. B5 vitamins containing 1 mg/l 2,4-D. After co-cultivation calli are washed with sterile water followed by a non-selective cultivation period on similar medium containing 500 mg/l cefotaxime for eliminating remaining Agrobacterium cells. After 3-10 days explants are transferred to MS based selective medium incl. B5 vitamins containing 1 mg/l 2,4-D for another 3 weeks harbouring 25 mg/l of hygromycin (genotype dependent). All treatments are made at 23° C. under dark conditions. Resistant calli are further cultivated on medium lacking 2,4-D including 1 mg/l BA and 25 mg/l hygromycin under 16 h light photoperiod resulting in the development of shoot structures. Shoots are isolated and cultivated on selective rooting medium (MS based including, 20 g/l sucrose, 20 mg/l hygromycin and 500 mg/l cefotaxime). Tissue samples from regenerated shoots are used for DNA analysis. Other transformation methods for sugarcane are known in the art, for example from the international application published as WO2010/151634A and the granted European patent EP1831378.

### Example 10

### Phenotypic Evaluation Procedure

### 10.1 Evaluation Setup

[0396] 35 to 90 independent T0 rice transformants were generated. The primary transformants were transferred from a tissue culture chamber to a greenhouse for growing and harvest of T1 seed. Six events, of which the T1 progeny segregated 3:1 for presence/absence of the transgene, were retained. For each of these events, approximately 10 T1 seedlings containing the transgene (hetero- and homo-zygotes) and approximately 10 T1 seedlings lacking the transgene (nullizygotes) were selected by monitoring visual marker expression.

[0397] The transgenic plants and the corresponding nullizygotes were grown side-by-side at random positions. Greenhouse conditions were of shorts days (12 hours light), 28° C. in the light and 22° C. in the dark, and a relative humidity of 70%. Plants grown under non-stress conditions were watered at regular intervals to ensure that water and nutrients were not limiting and to satisfy plant needs to complete growth and development, unless they were used in a stress screen.

[0398] From the stage of sowing until the stage of maturity the plants were passed several times through a digital imaging cabinet. At each time point digital images (2048×1536 pixels, 16 million colours) were taken of each plant from at least 6 different angles.

[0399] T1 events can be further evaluated in the T2 generation following the same evaluation procedure as for the T1 generation, e.g. with less events and/or with more individuals per event.

### Drought Screen

[0400] T1 or T2 plants are grown in potting soil under normal conditions until they approached the heading stage. They are then transferred to a “dry” section where irrigation is withheld. Soil moisture probes are inserted in randomly chosen pots to monitor the soil water content (SWC). When SWC goes below certain thresholds, the plants are automatically re-watered continuously until a normal level is reached again. The plants are then re-transferred again to normal conditions. The rest of the cultivation (plant maturation, seed harvest) is the same as for plants not grown under abiotic stress conditions. Growth and yield parameters are recorded as detailed for growth under normal conditions.

### Nitrogen Use Efficiency Screen

[0401] T1 or T2 plants are grown in potting soil under normal conditions except for the nutrient solution. The pots are watered from transplantation to maturation with a specific nutrient solution containing reduced N nitrogen (N) content, usually between 7 to 8 times less. The rest of the cultivation (plant maturation, seed harvest) is the same as for plants not grown under abiotic stress. Growth and yield parameters are recorded as detailed for growth under normal conditions.

### Salt Stress Screen

[0402] T1 or T2 plants are grown on a substrate made of coco fibers and particles of baked clay (Argex) (3 to 1 ratio). A normal nutrient solution is used during the first two weeks after transplanting the plantlets in the greenhouse. After the first two weeks, 25 mM of salt (NaCl) is added to the nutrient solution, until the plants are harvested. Growth and yield parameters are recorded as detailed for growth under normal conditions.

### 10.2 Statistical Analysis: F Test

[0403] A two factor ANOVA (analysis of variants) was used as a statistical model for the overall evaluation of plant phenotypic characteristics. An F test was carried out on all the parameters measured of all the plants of all the events transformed with the gene of the present invention. The F test was carried out to check for an effect of the gene over all the transformation events and to verify for an overall effect of the gene, also known as a global gene effect. The threshold for significance for a true global gene effect was set at a 5% probability level for the F test. A significant F test value points to a gene effect, meaning that it is not only the mere presence or position of the gene that is causing the differences in phenotype.

### 10.3 Parameters Measured

[0404] From the stage of sowing until the stage of maturity the plants were passed several times through a digital imaging cabinet. At each time point digital images (2048×1536 pixels, 16 million colours) were taken of each plant from at least 6 different angles as described in WO2010/031780. These measurements were used to determine different parameters.

### Biomass-Related Parameter Measurement

[0405] The plant aboveground area (or leafy biomass) was determined by counting the total number of pixels on the digital images from aboveground plant parts discriminated from the background. This value was averaged for the pictures taken on the same time point from the different angles and was converted to a physical surface value expressed in square mm by calibration. Experiments show that the aboveground plant area measured this way correlates with the biomass of plant parts above ground. The above ground area is the area measured at the time point at which the plant had reached its maximal leafy biomass.

[0406] Increase in root biomass is expressed as an increase in total root biomass (measured as maximum biomass of roots observed during the lifespan of a plant); or as an increase in the root/shoot index, measured as the ratio between root mass and shoot mass in the period of active growth of root and shoot. In other words, the root/shoot index is defined as the ratio of the rapidity of root growth to the rapidity of shoot growth in the period of active growth of root and shoot. Root biomass can be determined using a method as described in WO 2006/029987.

[0407] A robust indication of the height of the plant is the measurement of the location of the centre of gravity, i.e. determining the height (in mm) of the gravity centre of the leafy biomass. This avoids influence by a single erect leaf, based on the asymptote of curve fitting or, if the fit is not satisfactory, based on the absolute maximum.

### Parameters Related to Development Time

[0408] The early vigour is the plant aboveground area three weeks post-germination. Early vigour was determined by counting the total number of pixels from aboveground plant parts discriminated from the background. This value was averaged for the pictures taken on the same time point from different angles and was converted to a physical surface value expressed in square mm by calibration.

[0409] Early seedling vigour is the seedling aboveground area . . . week post-germination (plantlets of about 4 cm high).

[0410] AreaEmer is an indication of quick early development when this value is decreased compared to control plants. It is the ratio (expressed in %) between the time a plant needs to make 30% of the final biomass and the time needs to make 90% of its final biomass.

[0411] The “time to flower” or “flowering time” of the plant can be determined using the method as described in WO 2007/093444.

### Seed-Related Parameter Measurements

[0412] The mature primary panicles were harvested, counted, bagged, barcode-labelled and then dried for three days in an oven at 37° C. The panicles were then threshed and all the seeds were collected and counted. The seeds are usually covered by a dry outer covering, the husk. The filled husks (herein also named filled florets) were separated from the empty ones using an air-blowing device. The empty husks were discarded and the remaining fraction was counted again. The filled husks were weighed on an analytical balance.

[0413] The total number of seeds was determined by counting the number of filled husks that remained after the separation step. The total seed weight was measured by weighing all filled husks harvested from a plant.

[0414] The total number of seeds (or florets) per plant was determined by counting the number of husks (whether filled or not) harvested from a plant.

[0415] Thousand Kernel Weight (TKW) is extrapolated from the number of seeds counted and their total weight.

[0416] The Harvest Index (HI) in the present invention is defined as the ratio between the total seed weight and the above ground area (mm²), multiplied by a factor 10⁶.

[0417] The number of flowers per panicle as defined in the present invention is the ratio between the total number of seeds over the number of mature primary panicles.

[0418] The “seed fill rate” or “seed filling rate” as defined in the present invention is the proportion (expressed as a %) of the number of filled seeds (i.e. florets containing seeds) over the total number of seeds (i.e. total number of florets). In other words, the seed filling rate is the percentage of florets that are filled with seed.

### Example 11

### Results of the Phenotypic Evaluation of the Transgenic Plants

### 1. HhH-GPD-Related Polypeptides

[0419] The results of the evaluation of transgenic rice plants expressing HhH-GPD-related polypeptide when grown under abiotic stress conditions, particularly under drought-stress conditions are presented hereunder. An increase was observed for (leafy) biomass (AreaMax), Time to flower (TimetoFlower), total root biomass (RootMax), total seed yield (Totalwgseeds), fillrate, harvest index, number of filled seeds (nrfilledseed), taller more erect plants (HeightMax), height of the plant (GravityYMax), amount of thick roots (RootThickMax). (Table D1).

[0420] In addition, plants expressing HhH-GPD-related polypeptide showed in one or more lines having early development (AreaEmer), increased amount of thin roots (RootThinMax), increased amount of root and shoot biomass (RootShInd), increased number of florets per panicle on a plant (flowerperpan), short time to accruing biomass (AreaCycl).

TABLE D1
Data summary for transgenic rice plants; for each parameter,
the overall percent increase is shown for the confirmation
(T1 generation), for each parameter the p-value is <0.05.

| Parameter | Overall increase |
|---|---|
| AreaMax | 6.0 |
| TimetoFlower | 5.0 |
| RootMax | 11.1 |
| totalwgseeds | 19.2 |
| nrfilledseed | 17.8 |
| fillrate | 25.6 |
| harvest index | 12.0 |
| HeightMax | 7.4 |
| GravityYMax | 9.3 |
| RootThickMax | 10.8 |

### 2. Calnexin-Related Polypeptides

[0421] The results of the evaluation of transgenic rice plants in the T2 generation and expressing a nucleic acid encoding the calnexin-related polypeptide of SEQ ID NO: 81 under drought stress conditions are presented below in Table D2. When grown under drought stress conditions, an increase of at least 5% was observed for seed yield, particularly total weight of seeds, number of seeds, fill rate, harvest index, and for late greenness (LateGN). In addition, plants expressing a calnexin-related nucleic acid showed increased total root biomass (RootMax), a faster growth rate (a shorter time (in days) needed between sowing and the day the plant reaches 90% of its final biomass (AreaCycl), early greenness at the time point before the flowering time point (EarlyGN), late greenness at the time point after or at the flowering time point (LateGN), increased relative growth (RGR).

TABLE D2
Data summary for transgenic rice plants; for each parameter,
the overall percent increase is shown for the confirmation
(T1 generation), for each parameter the p-value is <0.05.

| Parameter | Overall increase |
|---|---|
| totalwgseeds | 48.3 |
| nrfilledseed | 43.1 |
| fillrate | 48.5 |
| harvest index | 46.4 |
| LateGN | 38.8 |

1-45. (canceled)

46. A method for enhancing yield in a plant relative to a control plant, comprising modulating expression in a plant of a nucleic acid encoding a calnexin-related polypeptide or a HhH-GPD-related polypeptide,
wherein said calnexin-related polypeptide comprises one or more of Motif 4 (SEQ ID NO: 254), Motif 5 (SEQ ID NO: 255) and Motif 6 (SEQ ID NO: 256), and/or comprises at least one of Interpro domain IPR001580, Interpro domain IPR008985, Interpro domain IPR009033, Interpro domain IPR013320 and Interpro domain IPR018124,
or
wherein said HhH-GPD-related polypeptide comprises one or more of Motif 1 (SEQ ID NO: 73), Motif 2 (SEQ ID NO: 74) and Motif 3 (SEQ ID NO: 75), and/or comprises all or at least one of Interpro domain IPR023170, Interpro domain IPR011257 and Interpro domain IPR003265.

47. The method of claim 46, wherein said modulated expression is effected by introducing and expressing in said plant a nucleic acid molecule encoding said calnexin-related polypeptide or said HhH-GPD-related polypeptide.

48. The method of claim 46, wherein:
(a) said nucleic acid encodes a calnexin-related polypeptide and is selected from the group consisting of:
(i) a nucleic acid comprising the nucleotide sequence of SEQ ID NO: 80 or the complement thereof;
(ii) a nucleic acid encoding a polypeptide comprising the amino acid sequence of SEQ ID NO: 81;
(iii) a nucleic acid having at least 30% sequence identity to the nucleotide sequence of SEQ ID) NO: 80, wherein said nucleic acid encodes a polypeptide that is not the polypeptide comprising the amino acid sequence of SEQ ID NO: 81;
(iv) a nucleic acid encoding a polypeptide having at least 50% sequence identity to the amino acid sequence of SEQ ID NO: 81; and
(v) a nucleic acid hybridizes with any of the nucleic acid of (i) or (ii) under stringent hybridization conditions, wherein said nucleic acid encodes a polypeptide that is not the polypeptide comprising the amino acid sequence of SEQ ID NO: 81;
or
(b) said nucleic acid encodes a HhH-GPD-related polypeptide and is selected from the group consisting of:
(i) a nucleic acid comprising the nucleotide sequence of SEQ ID NO: 1 or 3, or the complement thereof;
(ii) a nucleic acid encoding a polypeptide comprising the amino acid sequence of SEQ ID NO: 2 or 4;
(iii) a nucleic acid having at least 30% sequence identity to the nucleotide sequence of SEQ ID NO: 1 or 3, wherein said nucleic acid encodes a polypeptide that is not the polypeptide comprising the amino acid sequence of SEQ ID NO: 2 or 4;
(iv) a nucleic acid encoding a polypeptide having at least 50% sequence identity to the amino acid sequence of SEQ ID NO: 2 or 4; and
(v) a nucleic acid hybridizes with any of the nucleic acid of (i) or (ii) under stringent hybridization conditions, wherein said nucleic acid encodes a polypeptide that is not the polypeptide comprising the amino acid sequence of SEQ ID NO: 2 or 4.

49. The method of claim 46, wherein:
(a) said nucleic acid encodes a calnexin-related polypeptide and said enhanced yield comprises increased total seed yield, increased fillrate, increased TKW, increased number of filled seeds, taller more erect plants, increased amount of thick roots, increased number of florets per panicle on a plant, increased harvest index, increased greenness of a plant before flowering, increased height of the plant, and/or increased quick early development relative to a control plant;
or
(b) said nucleic acid encodes a HhH-GPD-related polypeptide and said enhanced yield comprises increased (leafy) biomass, shorter time to flower, increased total root biomass, increased total seed yield, increased fillrate, increased harvest index, increased number of panicles in the first flush, increased number of filled seeds, increased height of the plant, taller more erect plants, and/or increased amount of thick roots relative to a control plant.

50. The method of claim 46, wherein said enhanced yield is obtained under non-stress conditions.

51. The method of claim 46, wherein:
(a) said nucleic acid encodes a calnexin-related polypeptide and said enhanced yield is obtained under conditions of drought stress, salt stress or nitrogen deficiency;
or
(b) said nucleic acid encodes a HhH-GPD-related polypeptide and said enhanced yield is obtained under drought stress.

52. The method of claim 47, wherein said nucleic acid is operably linked to a constitutive promoter, a GOS2 promoter, or a GOS2 promoter from rice.

53. The method of claim 47, wherein said nucleic acid is of plant origin, from a dicotyledonous plant, from a plant of the family Salicaceae, from a plant of the genus Populus, or from a Populus trichocarpa plant.

54. A plant obtained by the method of claim 46, or a plant part, seed or progeny of said plant, wherein said plant, or said plant part, seed or progeny, comprises a recombinant nucleic acid encoding said calnexin-related polypeptide or said HhH-GPD-related polypeptide.

55. A construct comprising:
(a) a nucleic acid encoding the calnexin-related polypeptide or the HhH-GPD-related polypeptide as defined in claim 46;
(b) one or more control sequences capable of driving expression of the nucleic acid of (a); and optionally
(c) a transcription termination sequence.

56. The construct of claim 55, wherein one of said control sequences is a constitutive promoter, a GOS2 promoter, or a GOS2 promoter from rice.

57. A method for making a plant having increased yield, increased seed yield and/or increased biomass relative to a control plant, comprising introducing into a plant the construct of claim 55.

58. A plant, plant part or plant cell comprising the construct of claim 55.

59. A method for producing a transgenic plant having increased yield, increased seed yield and/or increased biomass relative to a control plant, comprising:
(a) introducing and expressing in a plant a nucleic acid encoding the calnexin-related polypeptide or the HhH-GPD-related polypeptide as defined in claim 46; and
(b) cultivating the plant under conditions promoting plant growth and development.

60. A plant having increased yield, increased seed yield and/or increased biomass relative to a control plant resulting from modulated expression of a nucleic acid encoding the calnexin-related polypeptide or the HhH-GPD-related polypeptide as defined in claim 46, or a transgenic plant part or plant cell originating from said plant.

61. A method for producing a product, comprising growing the plant of claim 54, and producing a product from or by said plant or parts thereof.

62. The plant of claim 54, wherein said plant is a crop plant, a dicot plant, a monocot plant or a cereal plant, or wherein said plant is sugar beet, alfalfa, trefoil, chicory, carrot, cassava, cotton, soybean, canola, sugarcane, rice, maize, wheat, barley, millet, rye, triticale, sorghum emmer, spelt, secale, einkorn, teff, milo or oats.

63. Harvestable parts of the plant of claim 54, wherein said harvestable parts comprise a recombinant nucleic acid encoding said calnexin-related polypeptide or said HhH-GPD-related polypeptide.

64. The harvestable parts of claim 63, wherein said harvestable parts are shoot and/or root biomass and/or seeds.

65. Products produced from the plant of claim 54 and/or from harvestable parts of said plant.

The application's sequence listing, which the Patent Office published only in electronic form, follows.

SEQUENCE LISTING (260 sequences)

SEQ ID NO: 1 - DNA, 1125 bp, Populus trichocarpa
atgggcgaacaaaccaaaatccaacctcaatcacaaccagtccaatcagaatcccaggctctcccccaaatcgaagcccaggtccaaactcaatcactgtctcagccattcaatacccccaccaccaccacctcggaattaaccactgttccaccaccaatcacatctcctcccgccaaaatcccttcccgtcctcgtaaaatccgtaaagtctcacccaatgctgctgccaccaccgctaacgaccctaattcttccccaacctccaccactaccacaactgaaacacccaaaagccctgccatcaaaaccccaagaacaaaaacgtcccaacagctagtaatcgccactccgcggatcgtggcaagatctctaacatgtgaaggtgagcttgaatacgcaattcactatctccgtaacgccgatccactccttgcttccttaattgacatctaccagcctcctagctttgatacgttccccactcctttccttgctctcgctcgcagcattctttaccagcaacttgcttttaaagcagggtcttcaatttacacgcgctttatttcgctttgtggtggagaggctggagttttacccgaaacagttcttgctttgactccacaacagttgaggcaatttggggtttctgggcgtaaagcgagttaccttcatgatctagctagaaagtatcgaaatggtattttatcggattctgcgattgtaaatatggatgatagatcgctttttacaatgcttactatggtaaatgggattggttcatggtcagtgcatatgttcatgattttctcgctgcatagaccggatgtgctgccaattaatgatcttcaagtgaggaaaggggtgcagttgctttataatttgccggagttgccacgcccatcacagatggatcagttgtgtgaaaaatggaggccgtataggtcggttgcgtcatggtatctttggagattacaagagtcaaaagggtcaccttccagtgtgatagcagtgtctactagtggtaatttgacacagcaacagcaggaagaccagcagcagcctcagcttattgacccaataaacagcattctcaatcttggggcctgtgcttggggacaatga

SEQ ID NO: 2 - protein, 374 aa, Populus trichocarpa
MGEQTKIQPQSQPVQSESQALPQIEAQVQTQSLSQPFNTPTTTTSELTTVPPPITSPPAKIPSRPRKIRKVSPNAAATTANDPNSSPTSTTTTTETPKSPAIKTPRTKTSQQLVIATPRIVARSLTCEGELEYAIHYLRNADPLLASLIDIYQPPSFDTFPTPFLALARSILYQQLAFKAGSSIYTRFISLCGGEAGVLPETVLALTPQQLRQFGVSGRKASYLHDLARKYRNGILSDSAIVNMDDRSLFTMLTMVNGIGSWSVHMFMIFSLHRPDVLPINDLQVRKGVQLLYNLPELPRPSQMDQLCEKWRPYRSVASWYLWRLQESKGSPSSVIAVSTSGNLTQQQQEDQQQPQLIDPINSILNLGACAWGQ

SEQ ID NO: 3 - DNA, 1146 bp, Populus trichocarpa
atgggcgaacagacccaaatccaacctcaaccacaaccttcccaatcagaatcccagcctctgccacaaatcgaagcccaggcttacactcagccactcaatgaccccaccaccactgtaataaccactactaccacggaatcaaccactatcccaccatcaatcacatctcctcccgcaaaaatcccttcccgtcctcgtaaaatccgtaaactctcacccgatgctgctgttgtcaccaccgttaacgaccctaattccacccaaacctccatcaaaaacacaactgaaccacccagaaccactgccaccaaaaccccaagaactaaaaccgcccaacatcgagcaatcgtcgcactcgctccgcggatcatggcacgatctctaacatgtgaaggtgaacttgaaatcgcaattcgccatctccgtaacgctgatccactccttgcttccttaattgacatttacccaccccctacctttgataccttccctactcctttccttgctctcgctcgtagcattctttaccagcaacttgcttttaaagcagggacctcaatttacacgcgctttatttcgctttgtggcggcgaggctggagttttaccggaaacagttcttgctttgactccacaacagttgaggcaaattggggtttctgggcgtaaagcgagttaccttcatgatctagctaggaagtatcaaaatgggattttatcggattctgcgattgtaaatatggatgataaatctctttttactatgcttactatggtaaatgggattggttcttggtcagtgcatatgtttatgattttttcgctgcatagaccggatgtgttgccaattaatgatcttcaagtgaggaaagggttgcaagtgctttataacttgccggagttgccacgcccatcacagatggatcacctgtgtgaaaaatggaggccgtataggtcggttgcatcatggtatctttggagatttcaagaggtaaaagggtcaccttcgagtgctgtggcattggcttcaagtggtaatttgacacaacaacagcaggaggaacaacagcatcagcaggagcctcagcttattgacccgataaacagcattctcaatcttggggcctgtgcttggggacaatga

SEQ ID NO: 4 - protein, 381 aa, Populus trichocarpa
MGEQTQIQPQPQPSQSESQPLPQIEAQAYTQPLNDPTTTVITTTTTESTTIPPSITSPPAKIPSRPRKIRKLSPDAAVVTTVNDPNSTQTSIKNTTEPPRTTATKTPRTKTAQHRAIVALAPRIMARSLTCEGELEIAIRHLRNADPLLASLIDIYPPPTFDTFPTPFLALARSILYQQLAFKAGTSIYTRFISLCGGEAGVLPETVLALTPQQLRQIGVSGRKASYLHDLARKYQNGILSDSAIVNMDDKSLFTMLTMVNGIGSWSVHMFMIFSLHRPDVLPINDLQVRKGLQVLYNLPELPRPSQMDHLCEKWRPYRSVASWYLWRFQEVKGSPSSAVALASSGNLTQQQQEEQQHQQEPQLIDPINSILNLGACAWGQ

SEQ ID NO: 5 - DNA, 1170 bp, Arabidopsis lyrata
atgggtgaacattcaccttctcaaccatcgtctcaaactcatccccaaaatcaaccagaatcacccaatcccgaaacccctaatccaattccaccgggaactaacgatgatgactccgcctcatccgccggagtttctggctcaatcgtctcattaaccaccattgaagcaccacgagtcactgaattaggcaatgtatcgtctccaccttccaaaatcccactccgtcctcgaaaaatccggaaactttcacccgacgatgacgcttccggtaacggcgacggattcaatccggagcataaccttttggcgacgacttcaaaaccggcagtgaagagtaaattgtcacagtcacgctgtgtaaccgtgccgagaatccacgcgaggtctctaacctgtgaaggcgagcttgaagcagcgcttcaccatctccgaagtgttgatcctctgctcgcgtcgttaattgacattcacccaccaccaacgttcgagacttttcatactccgttcttggctttgattcgaagcattctttatcagcagttagcagctaaggcagggaattcaatctacacccgcttcgttgccttatgcggcggtgaaaacggcgtcgttccagagaatgtattgcctttaacacctcaacagcttcgacaaatcggtgtttccgggcgtaaagccagttaccttcatgatcttgctaggaaatatcaaaatgggatcttgtcggattctggaatagtgaatatggatgagaaatctttgttcaccatgttaacaatggtgaatgggattggctcatggtcagttcatatgtttatgataaactctcttcatagacccgatgtgttaccagttaatgatcttggtgtaaggaaaggtgtgcagatgcttaatgccatggaggatttgcctcgtccatcgaaaatggagcagctttgcgagaaatggcgtccgtatagatcagtagcgtcgtggtacatgtggcggctcattgaatctaaaggtacaccaccgaatgctgcggctgtgacggctggagctgctctttcgtttccacagttggaagacattcaacaacaacaagaagaacaacatcatcaacaacagccacagcttatggacccccttaataatgtgttcagtatcggggcatggggccaaacatag

SEQ ID NO: 6 - protein, 389 aa, Arabidopsis lyrata
MGEHSPSQPSSQTHPQNQPESPNPETPNPIPPGTNDDDSASSAGVSGSIVSLTTIEAPRVTELGNVSSPPSKIPLRPRKIRKLSPDDDASGNGDGFNPEHNLLATTSKPAVKSKLSQSRCVTVPRIHARSLTCEGELEAALHHLRSVDPLLASLIDIHPPPTFETFHTPFLALIRSILYQQLAAKAGNSIYTRFVALCGGENGVVPENVLPLTPQQLRQIGVSGRKASYLHDLARKYQNGILSDSGIVNMDEKSLFTMLTMVNGIGSWSVHMFMINSLHRPDVLPVNDLGVRKGVQMLNAMEDLPRPSKMEQLCEKWRPYRSVASWYMWRLIESKGTPPNAAAVTAGAALSFPQLEDIQQQQEEQHHQQQPQLMDPLNNVFSIGAWGQT

SEQ ID NO: 7 - DNA, 822 bp, Arabidopsis lyrata
atgtctctccgtaaaaccctaaccgccgtgaatcaaccttcgttgtcgccgggttcttcaattgtcgccgttaaactggcggattcagaggcctctggttcttcttctagaatcacgtttcgacctcgtaaaatccggaaagtttcgtcagatccgtcgccgagaatcatcatcaccgcgtctcctcctttatcaaccaaatcgacggttgatctcgctctccgtcacttacaaagctccgacgaactcctcggagccataatcacatcgcacaacgatcctccagtgttcgaatcaagcaatcctccgtttctctccctagcgagatcaatcctctaccaacaactcgcgacaaaagcagcgaaatgtatctacgatcgattcatctctttattcaacggcggagaatcaggtgttgttcctgaatctgtgatctctctctccgccgttgatcttcgtaagataggtgtctccgggagaaaagcgagttaccttcacgatttagctgagaaatataacaacggtgtgctttccgatgaattgattatgaaaatgagtgatgaagagttgattgagagattaacattggttaaaggaattggagtgtggactgttcatatgttcatgatcttctctttgcatagacctgatgtgttacctgtgggagatttaggtgtgaggaatggtgtgaaagatctttatggtttgaaagatcttccaggtccattgcaaatggagcagctttgtgagaaatggcgtccttataggtccgttggttcatggtacatgtggagactaatcgaggctcgtaagaccaaatag

SEQ ID NO: 8 - protein, 273 aa, Arabidopsis lyrata
MSLRKTLTAVNQPSLSPGSSIVAVKLADSEASGSSSRITFRPRKIRKVSSDPSPRIIITASPPLSTKSTVDLALRHLQSSDELLGAIITSHNDPPVFESSNPPFLSLARSILYQQLATKAAKCIYDRFISLFNGGESGVVPESVISLSAVDLRKIGVSGRKASYLHDLAEKYNNGVLSDELIMKMSDEELIERLTLVKGIGVWTVHMFMIFSLHRPDVLPVGDLGVRNGVKDLYGLKDLPGPLQMEQLCEKWRPYRSVGSWYMWRLIEARKTK

SEQ ID NO: 9 - DNA, 1149 bp, Arabidopsis thaliana
atgggagaacaatcaccttctcaaccatcgactcaatgccaaagtcatccacaatcacccaaacccgatactcataacctaatcccaccggaatccaccgatgaatgtctcgattcagctggagtttcaggctcaatcgtctcatctaccacaatcgacgctcgacggatcactgaactaggcaatgtatcgtctccgccgtccaaaatccctctccgccctcggaaaatccggaaactcacactcgacggagacgtctccggtgaagattataaggcggaggatatctcctcatctcaagtaaactctccgctcgcgacggatggaaaatctcccggtaaaggtaaattgtcgcacttacgagctataactgtgccgaggatccaagctcgtcctctgacatgtgaaggtgagctcgaaacagcgattcactatctccgtaacgcggatcctttgctcgcggcgttaatcgacgttcatccaccgccgacgtttgagtcttttaagactccgttcttagctctgatacgaaacatcctctaccaacagcttgcaatgaaagctgggaattcaatctacacacgatttgtttctctctgcggcggcgaaaatttggttgtacctgagacggtcttatcattaaatcctcagcagcttcgtcaaattggtgtctcgggacgtaaggcgagttatcttcatgatttagctagaaagtatcaaaacggaatcttgtcggattcggcgattttgaacatggatgagaagtctttgttcacgatgctaacaatggttaatggaattgggtcatggtctgttcatatgttcatgataaattctcttcatcgaccagatgttttgccggttaatgatctcggtgttaggaaaggagtgcagttgctgtatggcttagatgacctgcctcggccatcgcagatggagcagcattgtgctaagtggagaccgtacagatcagtgggttcgtggtacatgtggcggctcattgaagctaagagcacatcaacgagtgctgctgttgcagccggagtgtcattacctccattggaagatattcaacaagaacatcagcagcaacagcttatggaccctcttaatggtgtgttcagtatcggggcttggggacaatcgtag

SEQ ID NO: 10 - protein, 382 aa, Arabidopsis thaliana
MGEQSPSQPSTQCQSHPQSPKPDTHNLIPPESTDECLDSAGVSGSIVSSTTIDARRITELGNVSSPPSKIPLRPRKIRKLTLDGDVSGEDYKAEDISSSQVNSPLATDGKSPGKGKLSHLRAITVPRIQARPLTCEGELETAIHYLRNADPLLAALIDVHPPPTFESFKTPFLALIRNILYQQLAMKAGNSIYTRFVSLCGGENLVVPETVLSLNPQQLRQIGVSGRKASYLHDLARKYQNGILSDSAILNMDEKSLFTMLTMVNGIGSWSVHMFMINSLHRPDVLPVNDLGVRKGVQLLYGLDDLPRPSQMEQHCAKWRPYRSVGSWYMWRLIEAKSTSTSAAVAAGVSLPPLEDIQQEHQQQQLMDPLNGVFSIGAWGQS

SEQ ID NO: 11 - DNA, 1185 bp, Arabidopsis thaliana
atgggtgaacattcaccttctcaaccatcatctcatactcttcctccaaaccaaccggaatcacccaatcacgaaacccctaatccaattccaccggaaaccaacgatgacgactccgcctcatccgccggagtttctggctcaatcgtctcatcaaccaccattgaagcaccacaagtcactgaattaggcaatgtatcgtctccacctaccaagatccctctccgtcctcgaaaaatcagaaaactttcacccgacgacgacgcttccgacggattcaatccggagcataacctttctcagatgacgacgacgaaaccggcaacgaagagtaaattatcacagtcacgcactgtaaccgtgccgagaatccaagcaaggtctctcacttgtgaaggcgagcttgaagcagctcttcaccatctccgaagtgttgatcctctgctcgcgtctttaatcgacattcatccaccaccaacgttcgagacttttcagactccgttcttggcgttgattcgaagcattctttatcagcaattagcagctaaagcaggtaattcaatctacacacgcttcgttgccttatgcggcggtgaaaacggcgtcgtgccagagaatgtattgcctttaacacctcaacagcttcgtcaaattggtgtttccgggcgtaaagcgagttaccttcatgatcttgctaggaaatatcaaaatgggatcttgtcggattctggaatagtgaatatggatgagaaatctttgttcacgatgttaacaatggtgaatgggattgggtcatggtcggtccatatgtttatgataaactctcttcatagacctgatgtgttaccagttaatgatcttggtgtaaggaagggtgtgcagatgcttaatggtatggaggatttgcctcgtccatccaaaatggagcagctttgcgagaaatggcgtccgtatagatcagtagcgtcttggtacttgtggcggctcattgaatctaaaaatacaccacctaatgctgcggctgctacggccggagctgctctttcgtttccacagttggaagacattcagcaacaagaacaagaacagcaacatcaacaacatcagcaacaacagccgcagcttatggaccctcttaataatgtgttcagtatcgggtatagtcagctacattgtgcaacttag

SEQ ID NO: 12 - protein, 394 aa, Arabidopsis thaliana
MGEHSPSQPSSHTLPPNQPESPNHETPNPIPPETNDDDSASSAGVSGSIVSSTTIEAPQVTELGNVSSPPTKIPLRPRKIRKLSPDDDASDGFNPEHNLSQMTTTKPATKSKLSQSRTVTVPRIQARSLTCEGELEAALHHLRSVDPLLASLIDIHPPPTFETFQTPFLALIRSILYQQLAAKAGNSIYTRFVALCGGENGVVPENVLPLTPQQLRQIGVSGRKASYLHDLARKYQNGILSDSGIVNMDEKSLFTMLTMVNGIGSWSVHMFMINSLHRPDVLPVNDLGVRKGVQMLNGMEDLPRPSKMEQLCEKWRPYRSVASWYLWRLIESKNTPPNAAAATAGAALSFPQLEDIQQQEQEQQHQQHQQQQPQLMDPLNNVFSIGYSQLHCAT

SEQ ID NO: 13 - DNA, 822 bp, Arabidopsis thaliana
atgtctctccgtaaaaccctaaccgccgtgaatcaatcttcgttaccgccggattctttaatctccgccggtaatctcactgtttcagaggtctctggttcatcttctagaatcagatttcgtcctcgtaaaatcaggaaagtttcgtcagatccgtcgccgaggatcattatcaccgcgtctcctcctctatcaacaaaatcgactgttgatatcgctctacgtcacttacaaagctccgatgaacttctcggagcattaatcacaacgcacaacgatcctccactgttcgactcaagtaatactccgtttctctccttagcgagatcaatcctataccaacaactcgcgacgaaagcagcgaaatgtatctacgatcgattcatctctctattcaacggtggagaagcaggtgttgttcctgaatctgtgatctcactctccgccgttgatcttcgtaagatcggtgtctccgggagaaaagctagttacctccacgatctagctgataaatacaacaacggtgtgctttctgatgaattgattctgaaaatgagtgatgaagagttgattgataggttaactttggttaaaggaattggagtgtggactgttcatatgtttatgatcttctcgttgcatagacctgatgtgttgcctgtgggagatcttggtgtgaggaaaggtgtgaaagatctttatggtttgaaaaatcttccaggtccattgcaaatggagcagctttgtgagaaatggcgtccttataggtctgttggttcatggtacatgtggagactaatcgagtctcgtaagaccaaatag

SEQ ID NO: 14 - protein, 273 aa, Arabidopsis thaliana
MSLRKTLTAVNQSSLPPDSLISAGNLTVSEVSGSSSRIRFRPRKIRKVSSDPSPRIIITASPPLSTKSTVDIALRHLQSSDELLGALITTHNDPPLFDSSNTPFLSLARSILYQQLATKAAKCIYDRFISLFNGGEAGVVPESVISLSAVDLRKIGVSGRKASYLHDLADKYNNGVLSDELILKMSDEELIDRLTLVKGIGVWTVHMFMIFSLHRPDVLPVGDLGVRKGVKDLYGLKNLPGPLQMEQLCEKWRPYRSVGSWYMWRLIESRKTK

SEQ ID NO: 15 - DNA, 993 bp, Brassica napus
atgggcgaacaatcctcgtctcaaccacaatctccccaacccgagactcaaaccctaattccgccgcaatcaaacggcgcatccgtcaattcaaccgaagtctccggcgatatcgtctcatccaccaccatcgacacccgacggatcacggaactaggcaacgtatcgtctcccccttccaaaatccccctccgtccccggaaaatccggaagctcacgcacgacggcgaagacgctaaggcggaggaggataacaacaaaaccgccgctaaaggtaaaccgtcacgcgctataaccgtcccgagaatccacgcgcgccccctcacgtacgaaggcgagctcgaggcggcgattcaccacctccgcagcgcggaccccttgctcgcggagctgatcgacgtctaccctccgccgtcgttcgagtccttcccgactccgttcctggcgctgatacgcaacatcctctaccagcagctcgccgcgaaagccgggaactcgatctacactaggttcgtcgctctctgcggcggcgagcacgtcgtcgtccccgagacggtcttggccttggaccctcagcagcttcgtcagataggagtatcgggaaggaaggcgagctacctccacgacctcgctaggaagtatcaaaacggaatcttgtccgattccgcgattgtgagcatggatgataagtctctgttcacgatgctgacgatggttaatgggatcgggtcgtggtctgttcatatgtttatgatcaattctttgcacagacctgatgttttgccggttaatgatctcggggctaggaaaggcgttcagatgttgtataacttggaggagttgcctcggccttcgcaaatggagcagctttgtgttaagtggcggccggacaggtcggtggcttcttggtacatgtggcggcttattgaagctaagggcgcatcagcaacgagtactgtttcaccaagtgttatgtcgttgcgccgcccttag

SEQ ID NO: 16 - protein, 330 aa, Brassica napus
MGEQSSSQPQSPQPETQTLIPPQSNGASVNSTEVSGDIVSSTTIDTRRITELGNVSSPPSKIPLRPRKIRKLTHDGEDAKAEEDNNKTAAKGKPSRAITVPRIHARPLTYEGELEAAIHHLRSADPLLAELIDVYPPPSFESFPTPFLALIRNILYQQLAAKAGNSIYTRFVALCGGEHVVVPETVLALDPQQLRQIGVSGRKASYLHDLARKYQNGILSDSAIVSMDDKSLFTMLTMVNGIGSWSVHMFMINSLHRPDVLPVNDLGARKGVQMLYNLEELPRPSQMEQLCVKWRPDRSVASWYMWRLIEAKGASATSTVSPSVMSLRRP

SEQ ID NO: 17 - DNA, 1089 bp, Brassica napus
atgggcgaacaatcctcgtctcaaccacaatctccccaacccgagactcaaaccctaattccgccgcaatcaaacggcgcatccgtcaattcaaccgaagtctccggcgatatcgtctcatccaccaccatcgacacccgacggatcacggaactaggcaacgtctcgtctcccccttccaaaatccccctccgtccccggaaaatccggaagctcacgcacgacggcgaagacgctaaggcggaggaggataacaacaaaaccgccgctaaaggtaaaccgtcacgcgctataaccgtcccgagaatccacgcgcgccccctcacgtacgaaggcgagctcgaggcggcgattcaccacctccgcagcgcggaccccttgctcgcggagctgatcgacgtctaccctccgccgtcgttcgagtccttcccgactccgttcctggcgctgatacgcaacatcctctaccagcagctcgccgcgaaagccgggaactcgatctacactaggttcgtcgctctctgcggcggcgagcacgtcgtcgtccccgagacggtcttggccttggaccctcagcagcttcgtcagataggagtatcgggaaggaaggcgagctacctccacgacctcgctaggaagtatcaaaacggaatcttgtctgatgccgcgatcgtgagcatggatgacaagtcgctgttcacgatgctgacgatggttaatgggatcgggtcgtggtctgttcatatgtttatgatcaattctttgcatagacctgatgttttgccggttaatgatctcggggttaggaaaggtgttcagatgttgtataacttggaggagttgcctcggccttcgcagatggagcagctgtgtgttaagtggcggccgtacaggtcggtggcttcgtggtacatgtggcggcttattgaagctaagggcgcatcagcaacgagtactgtttcacgaagtgttatgtcgttgccgccgccgttagacgacattcaacaacaagaacatcagcagcagcagtcacagcagcttctggatcctatgagcgtgttcagtatcgggtcttggggacagtcataa

SEQ ID NO: 18 - protein, 362 aa, Brassica napus
MGEQSSSQPQSPQPETQTLIPPQSNGASVNSTEVSGDIVSSTTIDTRRITELGNVSSPPSKIPLRPRKIRKLTHDGEDAKAEEDNNKTAAKGKPSRAITVPRIHARPLTYEGELEAAIHHLRSADPLLAELIDVYPPPSFESFPTPFLALIRNILYQQLAAKAGNSIYTRFVALCGGEHVVVPETVLALDPQQLRQIGVSGRKASYLHDLARKYQNGILSDAAIVSMDDKSLFTMLTMVNGIGSWSVHMFMINSLHRPDVLPVNDLGVRKGVQMLYNLEELPRPSQMEQLCVKWRPYRSVASWYMWRLIEAKGASATSTVSRSVMSLPPPLDDIQQQEHQQQQSQQLLDPMSVFSIGSWGQS

SEQ ID NO: 19 - DNA, 1086 bp, Brassica napus
atgggcgaacaatcctcgtctcagccacaatctccccaacccgagactcaaaccctaattccgccgctatcaaacggcgcatccgtcaattcaaccgaagtctccggcgatatcgtctcatccaccaccatcgacacccgacggatcacggaactaggcaacgtctcgtctcccccttccaaaatcccccttcgtccccggaaaatccggaagctcacgcacgacgacggcgaagacgctaaggcggaggctgcagctaaaggtaaaccgtcgcagtcacgcgccgtaaccctcccgagaatccacgcgcgccccctcacgtgcgaaggcgagctcgaggcggcgattcaccatctccgcagcgcggatccgctgctcgtggagctgatcgacgtctaccctccgccttcgttcgagtccttcccgactcccttcttggctctgatacgcaacatcctctaccagcagctcgccgcgaaagccgggaactcgatctacactaggttcgtcgctctctgcggcggagagcacgtcgtcgtccccgagacggtcttggccttggaccctcagcagcttcgtcagataggagtatcgggaaggaaggcgagctacctccacgacctcgctaggaagtatcaaaacggaatcttgtccgattccgcgattgtgagcatggatgataagtctctgttcacgatgctgacgatggttaatgggatcgggtcgtggtctgttcatatgtttatgatcaattctttgcacagacctgatgttttgccggttaatgatctcggggctaggaaaggcgttcagatgttgtataacttggaggagttgcctcggccttcgcaaatggagcagctttgtgttaagtggcggccgtacaggtcggtggcttcttggtacatgtggcggcttattgaagctaagggcgcatcagcaacgagtactgtttcaccaagtgttatgtcgttgccgccgcccttagacgacattcaacaacaagaacatcagcagcagcagcagtcgcagcagcttctggatcctatgagcgtgttcagtatcgggtcttggggacagtcatag

SEQ ID NO: 20 - protein, 361 aa, Brassica napus
MGEQSSSQPQSPQPETQTLIPPLSNGASVNSTEVSGDIVSSTTIDTRRITELGNVSSPPSKIPLRPRKIRKLTHDDGEDAKAEAAAKGKPSQSRAVTLPRIHARPLTCEGELEAAIHHLRSADPLLVELIDVYPPPSFESFPTPFLALIRNILYQQLAAKAGNSIYTRFVALCGGEHVVVPETVLALDPQQLRQIGVSGRKASYLHDLARKYQNGILSDSAIVSMDDKSLFTMLTMVNGIGSWSVHMFMINSLHRPDVLPVNDLGARKGVQMLYNLEELPRPSQMEQLCVKWRPYRSVASWYMWRLIEAKGASATSTVSPSVMSLPPPLDDIQQQEHQQQQQSQQLLDPMSVFSIGSWGQS

SEQ ID NO: 21 - DNA, 795 bp, Citrus clementina
atggtcgagcaaacccagtcccaaacccagaaccaacccgaacctcaacccgaacccgaaacgcagcctccgccgaaccaggattccactactaccctcgccgtcattccggtccaaacggaaaccgctaacaacgcaaccattacccatgctaatgttacgccccagacatcatcccctccgtcaaaaattccgttacgtcctcgaaaaatccgaaaactctcccccgataacggagtcgaccaagccagttcatctcaaccaaccgaatcgtcgaaagccacatcagcgaaatccacaaaatcccgagccattcaacagcaacaacaaaccctaactgttcccagaattatcgctcggccgttatcgtccgaaggcgaagtcgaagctgcgattcgccatctccgtaacgcggatcgacagttagcttcgttaattgacatccacccgcctccgactttcgattcctttcacactccgtttttagccctaactcgcagcatcctttatcagcagttagctttcaaagctggcacatcgatttatacgcgcttcatcgcgctttgtggtggcgaagctggagtcgttccagagacggtccttgctttaacccctcaacagctgcgacaaattggggtctcaggtcggaaggcgagttatcttcacgatctcgcgagaaaataccagaatggaatactgtctgactccgcgatggtaaaatggatgataaatcgctcctcacgaagcttaacaagggtaaatggaatcggctcatggtcggtaccatgttcctga

SEQ ID NO: 22 - protein, 264 aa, Citrus clementina
MVEQTQSQTQNQPEPQPEPETQPPPNQDSTTTLAVIPVQTETANNATITHANVTPQTSSPPSKIPLRPRKIRKLSPDNGVDQASSSQPTESSKATSAKSTKSRAIQQQQQTLTVPRIIARPLSSEGEVEAAIRHLRNADRQLASLIDIHPPPTFDSFHTPFLALTRSILYQQLAFKAGTSIYTRFIALCGGEAGVVPETVLALTPQQLRQIGVSGRKASYLHDLARKYQNGILSDSAMVKWMINRSSRSLTRVNGIGSWSVPCS

SEQ ID NO: 23 - DNA, 717 bp, Citrus clementina
atggtcgagcaaacccagtcccaaacccagaaccaacccgaacctcaacccgaacccgaaacgcagcctccgccgaaccaggattccactactaccctcgccgtcattccggtccaaacggaaaccgctaacaacgcaaccattacccatgctaatgttacgccccagacatcatcccctccgtcaaaaattccgttacgtcctcgaaaaatccgaaaactctcccccgataacggagtcgaccaagccagttcatctcaaccaaccgaatcgtcgaaagccacatcagcgaaatccacaaaatcccgagccattcaacagcaacaacaaaccctaactgttcccagaattatcgctcggccgttatcgtccgaaggcgaagtcgaagctgcgattcgccatctccgtaacgcggatcgacagttagcttcgttaattgacatccacccgcctccgactttcgattcctttcacactccgtttttagccctaactcgcagcatcctttatcagcagttagctttcaaagctggcacatcgatttatacgcgcttcatcgcgctttgtggtggcgaagctggagtcgttccagagacggtccttgctttaacccctcaacagctgcgacaaattggggtctcaggtcggaaggcgagttatcttcacgatctcgcgagaaaatacagattggaatactgtctgactcggcgattgtaa

SEQ ID NO: 24 - protein, 238 aa, Citrus clementina
MVEQTQSQTQNQPEPQPEPETQPPPNQDSTTTLAVIPVQTETANNATITHANVTPQTSSPPSKIPLRPRKIRKLSPDNGVDQASSSQPTESSKATSAKSTKSRAIQQQQQTLTVPRIIARPLSSEGEVEAAIRHLRNADRQLASLIDIHPPPTFDSFHTPFLALTRSILYQQLAFKAGTSIYTRFIALCGGEAGVVPETVLALTPQQLRQIGVSGRKASYLHDLARKYRLEYCLTRRL

SEQ ID NO: 25 - DNA, 834 bp, Citrus clementina
atggtcgagcaaacccagtcccaaacccagaaccaacccgaacctcaacccgaacccgaaacgcagcctccgccgaaccaggattccactactaccctcgccgtcattccggtccaaacggaaaccgctaacaacgcaaccattacccatgctaatgttacgccccagacatcatcccctccgtcaaaaattccgttacgtcctcgaaaaatccgaaaactctcccccgataacggagtcgaccaagccagttcatctcaaccaaccgaatcgtcgaaagccacatcagcgaaatccacaaaatcccgagccattcaacagcaacaacaaaccctaactgttcccagaattatcgctcggccgttatcgtccgaaggcgaagtcgaagctgcgattcgccatctccgtaacgcggatcgacagttagcttcgttaattgacatccacccgcctccgactttcgattcctttcacactccgtttttagccctaactcgcagcatcctttatcagcagttagctttcaaagctggcacatcgatttatacgcgcttcatcgcgctttgtggtggcgaagctggagtcgttccagagacggtccttgctttaacccctcaacagctgcgacaaattggggtctcaggtcggaaggcgagttatcttcacgatctcgcgagaaaataccagaatggaatactgtctgactccgcgattgtaaatatggatgataaatcgctcttcacgatgcttacaatggttaatggaatcggctcatggtcgggacacatgttcatgattttctcgctgcaaaaaccggaagtttggccacattaa

SEQ ID NO: 26 - protein, 277 aa, Citrus clementina
MVEQTQSQTQNQPEPQPEPETQPPPNQDSTTTLAVIPVQTETANNATITHANVTPQTSSPPSKIPLRPRKIRKLSPDNGVDQASSSQPTESSKATSAKSTKSRAIQQQQQTLTVPRIIARPLSSEGEVEAAIRHLRNADRQLASLIDIHPPPTFDSFHTPFLALTRSILYQQLAFKAGTSIYTRFIALCGGEAGVVPETVLALTPQQLRQIGVSGRKASYLHDLARKYQNGILSDSAIVNMDDKSLFTMLTMVNGIGSWSGHMFMIFSLQKPEVWPH

SEQ ID NO: 27 - DNA, 720 bp, Citrus clementina
atggtcgagcaaacccagtcccaaacccagaaccaacccgaacctcaacccgaacccgaaacgcagcctccgccgaaccaggattccactactaccctcgccgtcattccggtccaaacggaaaccgctaacaacgcaaccattacccatgctaatgttacgccccagacatcatcccctccgtcaaaaattccgttacgtcctcgaaaaatccgaaaactctcccccgataacggagtcgaccaagccagttcatctcaaccaaccgaatcgtcgaaagccacatcagcgaaatccacaaaatcccgagccattcaacagcaacaacaaaccctaactgttcccagaattatcgctcggccgttatcgtccgaaggcgaagtcgaagctgcgattcgccatctccgtaacgcggatcgacagttagcttcgttaattgacatccacccgcctccgactttcgattcctttcacactccgtttttagccctaactcgcagcatcctttatcagcagttagctttcaaagctggcacatcgatttatacgcgcttcatcgcgctttgtggtggcgaagctggagtcgttccagagacggtccttgcttttacccctcaacagctgcgacaaatttggggtctcaggtcgggaaggcgagttatcttcacgatctcgcgaagaaaataccaaaagggaatactgtctgactcccccgattga

SEQ ID NO: 28 - protein, 239 aa, Citrus clementina
MVEQTQSQTQNQPEPQPEPETQPPPNQDSTTTLAVIPVQTETANNATITHANVTPQTSSPPSKIPLRPRKIRKLSPDNGVDQASSSQPTESSKATSAKSTKSRAIQQQQQTLTVPRIIARPLSSEGEVEAAIRHLRNADRQLASLIDIHPPPTFDSFHTPFLALTRSILYQQLAFKAGTSIYTRFIALCGGEAGVVPETVLAFTPQQLRQIWGLRSGRRVIFTISRRKYQKGILSDSPD

SEQ ID NO: 29 - DNA, 1188 bp, Gossypium hirsutum
atgggcgaacaaaccccgtcgcagcctcagccgcaggttcaatcccagccaccgaatgactcctctactacgactcaagcccaagttcaaacccaatctggagacccgagtaattcctccacggcccctgtttccaccgttaccaccgcctgtaccgccattgtagcatgtggtccgacggagctagtcaatgttcctctcccaacctcgtctcctccttcgaaaatcccttcccgccctagaaaaatccggaaactctcccctgacctgagcttcgaccccaatgcctcccaacaagcaacgacctcctcctccacatccctgaccgaacagcgtaaaaccgtcggcagaacttccaaaacaaaactcagtcaacatcgagccctagcggtggtggctccacgaatcattgctcggtccctctcttgcgagggcgaggtcgaaaccgccatccgccaccttcgcgacgccgatcccctcctcgcttccttaatcgacctccatccacctccgaccttcgacactttccatgcccctttcctcgcgctcactcggagcattctctaccaacagctcgctttcaaagccggaacctccatctacacccgcttcatctctctctgcggaggcgaaaacggggttgttcctgaaactgttctttctttaacctctcaacagctgcgacaaattggtgtctcgggacgaaaagcgagttaccttcatgatctcgcgagaaaataccagacggggatattatcggactcggcgattgtaaatatggatgacaaatcacttttcaccatgcttacgatggtcaatgggattggttcttggtcggttcatatgttcatgattttttcgcttcatagacccgatgttttgccaattaatgatctcggggttcgaaaaggggttcaattgctctacaatttggaggagttgccaaggccttcgcagatggatcaattgtgtgagaaatggaggccatacaggtcggttgcttcctggtatctttggaggtatgtggaggccaaggagcgccttcgagtgctgccgcggttgctgctggtgctagtcttccaccgctgcagcaacaagaggagccgcaacaacatcagcaacagccccacgcttatggaccccattaatagcattctcaaccttggggcctgtgcctgggggcaatga

SEQ ID NO: 30 - protein, 395 aa, Gossypium hirsutum
MGEQTPSQPQPQVQSQPPNDSSTTTQAQVQTQSGDPSNSSTAPVSTVTTACTAIVACGPTELVNVPLPTSSPPSKIPSRPRKIRKLSPDLSFDPNASQQATTSSSTSLTEQRKTVGRTSKTKLSQHRALAVVAPRIIARSLSCEGEVETAIRHLRDADPLLASLIDLHPPPTFDTFHAPFLALTRSILYQQLAFKAGTSIYTRFISLCGGENGVVPETVLSLTSQQLRQIGVSGRKASYLHDLARKYQTGILSDSAIVNMDDKSLFTMLTMVNGIGSWSVHMFMIFSLHRPDVLPINDLGVRKGVQLLYNLEELPRPSQMDQLCEKWRPYRSVASWYLWRYVEAKERLRVLPRLLLVLVFHRCSNKRSRNNISNSPTLMDPINSILNLGACAWGQ

SEQ ID NO: 31 - DNA, 933 bp, Gossypium hirsutum
atgaaccatcctccgccgcaaaccaccacgatcaccactagaaccaccgtaaaaaagctccgtgaaaaccccacaccgtcctccaaaatcccattccaatcccgcaaaatccgaaaactcaccaccactgcaaccgccgtcgacaacgaaccaaccaaatcccctcaccctcccctcataaaaatccccaaatctctatcaacaaaacccgaaatcgacgccgctattaaccacctccgcgcagccgatcctctcctcgccgccctcatttcaacccatcccccaccaaaactctcccctaataactcccccttcctctccctcaccaaatccataatcttccaacaactcgccaccaaagcggccaattcaatctacacccgctttgtctccctatgcggaacccattccgacgtcgttccgaacacggtcctttctctcaccccacaaaagctcagagaaaccggcgtctccgctcgcaaagcaagctacctccacgacctcaccgataagttctcgactgggtttttgtcggacactttgattctcacggcagacgatgaaacgttgttccaaatgttgacgtcggtgaaagggatcggtccttggtcagtccacatgttcatgatattctcgttgcacagacctgatgttttgccggtcggtgaccttggtgtaaggaaagggctgcagtgtttgtatgggttaaaggatttgcctaaaccaatgcaaatggaacagatttgtgagaaatggaggccttatagatcggttgggtcttggtatatgtggaggcttatggaagctaaaactacaaaagggaataatggcaatgctcagggtgttgttgaagatgatcaaagtgggagggttttgaaagaaaaaaaaagttttaggatggaagtttgcaactttttctgtattggcctgtaa

SEQ ID NO: 32 - protein, 310 aa, Gossypium hirsutum
MNHPPPQTTTITTRTTVKKLRENPTPSSKIPFQSRKIRKLTTTATAVDNEPTKSPHPPLIKIPKSLSTKPEIDAAINHLRAADPLLAALISTHPPPKLSPNNSPFLSLTKSIIFQQLATKAANSIYTRFVSLCGTHSDVVPNTVLSLTPQKLRETGVSARKASYLHDLTDKFSTGFLSDTLILTADDETLFQMLTSVKGIGPWSVHMFMIFSLHRPDVLPVGDLGVRKGLQCLYGLKDLPKPMQMEQICEKWRPYRSVGSWYMWRLMEAKTTKGNNGNAQGVVEDDQSGRVLKEKKSFRMEVCNFFCIGL

SEQ ID NO: 33 - DNA, 1125 bp, Glycine max
atgggcgaacagacgctaggtcaagcacaatccctaatcgaacctcaacctctccccgccccctcctcaactgccgtccccgacggtgccacggtggactccgaactaaacaatgtccctcggccgacaacatccccagccacgaaaatccccctccgtccccgcaagatccggaaggtctctccggacccctccacctccgaatcccaaaccgaaacccccaaacccgccaaaaccgggggccgcaacaccaccaaggctgctccgccgcgagcccttacggtggtccctcgtatagtggcgcgctcactctcctgcgacggtgaagtcgagatcgcgctccggtacctccgcaacgcggacccagtcctctcccctctcatcgacattcaccaacccccaaccttcgacaatttccacactcccttcctcgccctaacccgcagcatcttgtaccagcaactcgcgtacaaagccggcacctccatctacacgcgcttcatcgcgctctgcgggggcgaaaacggtgtcgttcccgaaaccgttctcgccctaacaccccaacagcttcgccagattggggtttctgggcggaaggcgagttaccttcatgatttggcgaggaagtatcagaacgggatactctccgattccgccattgtgaacatggatgataagtcgctctttaccatgctcaccatggtcaatggcattggctcttggtctgttcacatgttcatgattttctcactccacagacccgatgttctccccatcaatgaccttggcgtcaggaaaggagttcagcttctctacaacctcgaggacttaccccggccctcgcagatggaccagttgtgtgacaagtggaggccttaccggtccgttgcttcgtggtacatgtggagatttgttgaagccaagggaactccttcgagtgcggtggcggtagcgaccggtgctggcttgcagcagcagcagcaccaccagcaccatcaccagcaccaacaacaggaacaacaacagcagcagcagcagcaacagcagcatcctccacagccacagcttctggatcccatcaatagcatgtttaatctcggggccgcctgtgcttggggacaatga

SEQ ID NO: 34 - protein, 374 aa, Glycine max
MGEQTLGQAQSLIEPQPLPAPSSTAVPDGATVDSELNNVPRPTTSPATKIPLRPRKIRKVSPDPSTSESQTETPKPAKTGGRNTTKAAPPRALTVVPRIVARSLSCDGEVEIALRYLRNADPVLSPLIDIHQPPTFDNFHTPFLALTRSILYQQLAYKAGTSIYTRFIALCGGENGVVPETVLALTPQQLRQIGVSGRKASYLHDLARKYQNGILSDSAIVNMDDKSLFTMLTMVNGIGSWSVHMFMIFSLHRPDVLPINDLGVRKGVQLLYNLEDLPRPSQMDQLCDKWRPYRSVASWYMWRFVEAKGTPSSAVAVATGAGLQQQQHHQHHHQHQQQEQQQQQQQQQQHPPQPQLLDPINSMFNLGAACAWGQ

SEQ ID NO: 35 - DNA, 1056 bp, Glycine max
atgggcgaacagacgctaggtcaagcacaacccctccccgcccccgatgctgccacggcccactccgaactaaacaatgtccctcagccgacaacctccccagctacgaaaatccccctccgtccccgcaagatccggaaggtctctccggacccctccacctccgaagcccccatcaaacccgccaaacctgttggccgcaacaccacctccaaggctgctccgcctcgagccctgactgtggtccctcgcatagtggctcgctcactctcctgcgacggcgaggtcgagatctcgctccgctacctccgcaacgcggaccccctcctctcccctctgatcgacattcaccaacccccaaccttcgacaatttccacactcccttcctcgccctaacccgcagcatcttgtaccagcaactcgcgttcaaagccggcacctccatctacacgcgcttcatcggcctctgcggcggcgaaaacggcgtcgttcccgaaacagttctcgcccttactccccaacagcttcggcagattggggtttcggggcggaaggccagttaccttcacgatttggccaggaagtaccagaacgggatactctccgattccgccattgtgaacatggatgacaagtcgctcttcaccatgcttaccatggtcaatggcattggctcttggtctgttcacatgttcatgattttctcactccacagacccgatgttctccccatcaatgaccttggtgtcaggaaaggggttcagcttctctacaacctcgaggacttgccgcggccctcgcagatggaccagttgtgtgacaagtggaggccttatcggtctgttgcttcgtggtatatgtggagatttgttgaagccaagggaactccttcgagtgcggtgacggtagcgactggtgccggcttgcagcagcagcgccatcaccagcatcaacaacaggagcaacagcagcagcaacacgctccacagccacagcttctggatcccataaatagcatgtttaatcttggggctgcctgtgcttggggacaatga

SEQ ID NO: 36 - protein, 351 aa, Glycine max
MGEQTLGQAQPLPAPDAATAHSELNNVPQPTTSPATKIPLRPRKIRKVSPDPSTSEAPIKPAKPVGRNTTSKAAPPRALTVVPRIVARSLSCDGEVEISLRYLRNADPLLSPLIDIHQPPTFDNFHTPFLALTRSILYQQLAFKAGTSIYTRFIGLCGGENGVVPETVLALTPQQLRQIGVSGRKASYLHDLARKYQNGILSDSAIVNMDDKSLFTMLTMVNGIGSWSVHMFMIFSLHRPDVLPINDLGVRKGVQLLYNLEDLPRPSQMDQLCDKWRPYRSVASWYMWRFVEAKGTPSSAVTVATGAGLQQQRHHQHQQQEQQQQQHAPQPQLLDPINSMFNLGAACAWGQ

SEQ ID NO: 37 - DNA, 1146 bp, Malus x domestica
atgggcgagcaaacccaggtccaaacccaagcccaagaccagccccagactcccactcaggctccgactccggctcagccgccgccgcagcatgactccatcgacgacaccacaatcgctcaagtcggccccacacccaccgaactgagcaatgctccgtccaagacctcttcccccccttccaaaatcccgttccgcccccgaaagatccggaagctctcgcccgataccgccgaccccaattcctcccatcaaatcgtcgccgtatccgaaactcccaaacccgtcgccgccaccaaggcctccaagatcaagaccgtcccgcagcgcgccgttgcggcgcccaaaatcgtagcgcggccgctttcctgcgagggagagatcgagacggcgattcgctatctccgaaacgctgatccgctcctagctccgttgatcgaccgccacccgcggccgaccttcgacaacttccacacacccttcctcgccctaacccgcagcattctctaccagcaactcgcatacaaggccggcacgtcgatctacacgcgcttcatcgggctgtgcggcggcgaggcctgcgtcgtacccgaaaccgtgctcgcccagacgccgcagcagctccggcaagtcggaatttcgggccggaaagcgagttacctccacgacttggcgcggaagtaccagaacggcattctatcggactcggcgattgtaaatatggacgacaagtcgttgttcacaatgctgacgatggtcaacgggatcgggtcttggtctgtgcacatgttcatgattaactcgctgcacaggcccgacgtgcttccgatcaacgacctcggaatccggaaaggcgttcagcttctgtacaatcttgaggagctgcctcggccgtcgcagatggagcagctgtgcgaaaagtggcggccttaccggtcagtagcgacgatgtatatgtggagattttctgaatcaaatggggctccttcgagtgcggccggtgcgagtctgcgaccacagcagcttcagcagcaggagccgcaacaacagcagcagcagcagcactcgcagcatccccagcaacagcagcttatggattccttcagcagtcttattaatattggggcctgtacctggggaccttga

SEQ ID NO: 38 - protein, 381 aa, Malus x domestica
MGEQTQVQTQAQDQPQTPTQAPTPAQPPPQHDSIDDTTIAQVGPTPTELSNAPSKTSSPPSKIPFRPRKIRKLSPDTADPNSSHQIVAVSETPKPVAATKASKIKTVPQRAVAAPKIVARPLSCEGEIETAIRYLRNADPLLAPLIDRHPRPTFDNFHTPFLALTRSILYQQLAYKAGTSIYTRFIGLCGGEACVVPETVLAQTPQQLRQVGISGRKASYLHDLARKYQNGILSDSAIVNMDDKSLFTMLTMVNGIGSWSVHMFMINSLHRPDVLPINDLGIRKGVQLLYNLEELPRPSQMEQLCEKWRPYRSVATMYMWRFSESNGAPSSAAGASLRPQQLQQQEPQQQQQQQHSQHPQQQQLMDSFSSLINIGACTWGP

SEQ ID NO: 39 - DNA, 792 bp, Malus x domestica
atggccaagcgtgcgaaacctcaaatacaaacccaaatttccgaaaacccttccgtctcctccaaaatcccattccgaccccgcaaaatcttaaaagtatccaacacccccaacgccgccaagccctctccctcctcccccgcgctccccaaaaccctaatcccactaacctcccaatccgaaatcaatctcgccctccaacacttgcggagttccgacccgaatttaacagccctgatcgactcctacaccccgccgtccttcgattccagccgtccacctttcatatcccttgcaagaagcattatttaccagcaactcgccaccaaagccgcccaatcgatctacaaccggtttgtttcgctctgcggcggcgaggcctcggtggttgccgatgtcgttttgtcgctctcggcccagcagctcaggacaatcggcatctcggcccgaaaagcttcgtatcttcacgacctggccgagaagtacagcgatggaactttgtccgattcgtcgattctcgaaatggacgatgaggctctgctcacaatgctgactctggtgaagggaattggggtttggtcggtccacatgttcatgattttctcgcttcgccggccggacgtgcttccgattggcgatctcagcgtgaggaaaggagtgaagttgttgtatgggttgaaggagttgccgaagccgtgggagatggacgagctgtgtgagaaatggaggccttataggtctgttggttcatggtacatgtggaagtacatggaggccaagggggtcttgtag

SEQ ID NO: 40 - protein, 263 aa, Malus x domestica
MAKRAKPQIQTQISENPSVSSKIPFRPRKILKVSNTPNAAKPSPSSPALPKTLIPLTSQSEINLALQHLRSSDPNLTALIDSYTPPSFDSSRPPFISLARSIIYQQLATKAAQSIYNRFVSLCGGEASVVADVVLSLSAQQLRTIGISARKASYLHDLAEKYSDGTLSDSSILEMDDEALLTMLTLVKGIGVWSVHMFMIFSLRRPDVLPIGDLSVRKGVKLLYGLKELPKPWEMDELCEKWRPYRSVGSWYMWKYMEAKGVL

SEQ ID NO: 41 - DNA, 846 bp, Medicago truncatula
atgaaacgaactcgatctcaaatcaaatccaaccccacacccatcacaaatccacaacccccaatcaaaaccttaatctcttcaaaaatcaccttccccgccaaaaaaatccttaaacccaccatcaaaaccaaagaagaagtgaaaaaaccacactttccccttctcacaccaataatccaaaaaccattaacatcacaaaacgaaatcaccgccgcactcaaccacctccgcgctgctgacccactcctttccaccatcatcaacaccttccctccaccccaattctcaaactcaaacgctatcacacctttcttctctctcatcaaaaccctaatctcccaacaactctccatcaaagcatcctcttcaatcgaacaacgcttcatctcgctcttcaccaaccaatgttccatcctcccaaacaccgttttatccgttacaccggacactcttcgttccgttggaatctcggcgcgaaaagcaacctacattcacgacctagcaaccaagtacgctgatgggtttttatcggattcatcgattgttgaaatggacgatgaaatgctttacgagaaactaatgtcggttaagggaattggaccgtggtcggttcatatgtttatgatatttacgcttcatcgtcctgatgttttgcctgttggtgatcttgttgtgagaagaggtgttgagaaattgtatggtcttaaggttttgccttctcctgaaaaaatggagggtttgtgtgagaaatggaagccttataggtctgttgggtcttggtatatgtataggtttgttgaagctaaaggggttttaccaaatcccaccactactactacatag

SEQ ID NO: 42 - protein, 281 aa, Medicago truncatula
MKRTRSQIKSNPTPITNPQPPIKTLISSKITFPAKKILKPTIKTKEEVKKPHFPLLTPIIQKPLTSQNEITAALNHLRAADPLLSTIINTFPPPQFSNSNAITPFFSLIKTLISQQLSIKASSSIEQRFISLFTNQCSILPNTVLSVTPDTLRSVGISARKATYIHDLATKYADGFLSDSSIVEMDDEMLYEKLMSVKGIGPWSVHMFMIFTLHRPDVLPVGDLVVRRGVEKLYGLKVLPSPEKMEGLCEKWKPYRSVGSWYMYRFVEAKGVLPNPTTTTT

SEQ ID NO: 43 - DNA, 1038 bp, Nicotiana benthamiana
atgggtgaacaaacccaagtacaagcaaaacccgaaacccaaactccaccccaaccccatctccaaccccaatctctacccgattcagattccacccttgtatccagctctcccgttgatcttcccccaaacccctccaacccttccaaaatcccaattcgaccccagaaaatccgaaaactctcatccacccccttctcaaaaaccccacaaacgaccgcatcctccgcgacgccagcatccgcgaagagtcgccgaaagagcgcgccgaaatcatcatctagggttttgccacaaatcatcaaaccgttatcagctaacggcgaaatcgacaatgcactcttacacctccgttcagccgacccgcttctcggttccttaatagacacacttccggtccctcaatttgaatcacaccattctccgtttttagccctgagcaagagcattctgtaccagcaactagcttataaagcaggcacctcaatttacacgcgcttcgtgtctctttgtggaggagaggatgccgtttgccctgacatagtcctctccctatccgctcaacagctcaagcagattggtgtctcgggacgaaaggctagttatttatatgacttagctaataagtttaaaaatgggattttgtatgatgatgctcttgtaaagatggatgataagtcattgtttaccatgctttcgatggtgaagggtattggttcttggtcagtgcatatgttcatgattttttcactgcacaggccggatgttttgcctgttagtgatttgggggtcaggaaaggtgtccagttgttatacggattagaggaattacctaggccgtcacagatggagcaattgtgcgagaaatggagaccatataggtcagctggggcgtggtatatgtggcggtttgtggagtggaaagggactccaactactgctgcagctgcaattgactctggtaatgtgcagccattgcagcaaattcagacaggacaggagacacatcaacatcagttgcagctctcgagcctataa

SEQ ID NO: 44 - protein, 345 aa, Nicotiana benthamiana
MGEQTQVQAKPETQTPPQPHLQPQSLPDSDSTLVSSSPVDLPPNPSNPSKIPIRPQKIRKLSSTPFSKTPQTTASSATPASAKSRRKSAPKSSSRVLPQIIKPLSANGEIDNALLHLRSADPLLGSLIDTLPVPQFESHHSPFLALSKSILYQQLAYKAGTSIYTRFVSLCGGEDAVCPDIVLSLSAQQLKQIGVSGRKASYLYDLANKFKNGILYDDALVKMDDKSLFTMLSMVKGIGSWSVHMFMIFSLHRPDVLPVSDLGVRKGVQLLYGLEELPRPSQMEQLCEKWRPYRSAGAWYMWRFVEWKGTPTTAAAAIDSGNVQPLQQIQTGQETHQHQLQLSSL

SEQ ID NO: 45 - DNA, 1068 bp, Nicotiana tabacum
atgggtgaacaaacccaagtacaagcaaaacccgaaacccaaactccacctcaaccccaaccccaacccaattccgactccacccttgtatccaactctcccgttgatcttcccccaaacccctctaacccttccaaaatcccaattcgaccccaaaaaatacgaaaactctcttccctcccctcctcaaaaaccccgcaaatcaccgcatcctccgcgacgccagcatccaccaagagtcgccgaaagagcacaccgaaatcatcatctagggttttgccccaaatcatcaaacccttatcagctgacggcgaaatcgacaatgcactcttacacctccgttcagccgacccgcttctcggttccttaatagacacgcttccggtccctcaatttgagtcataccattctccgtttttagccctaagcaagagcattctgtaccagcaactagcttataaagcaggcacctcaatttacacacgcttcgtgtccctttgtggcggagaagatgccgtttgccctgacgtcgtcctctccctatccgctcaacaactcaagcagataggtgtctcggggcgaaaggctagttatttatatgacttagctcataagtataaaaatgggattttgtgtgatgatgcgcttgtaaagatggatgataagtcattgtttaccatgctttcgatggtgaagggtattggttcttggtcagtgcatatgttcatgatcttttcactgcataggccggatgttttgcctgttagtgatttgggggtcaggaaaggtgtgcagttgttatacggattagaggaattacctaggccgtcgcagatggagcaattctgcgagaaatggagaccatataggtcagctggggcgtggtatatgtggcggtttgtggaggagaaagggactccaactactgctgcagctgcaattgatgctggtaatgtgcagccgttgcagcaaattcagacaggacaggagacacagcaacatcagttgcagcttctcgagcctataaatggcattgggaatcttggggcttgcatttggagccaatga

SEQ ID NO: 46 - protein, 355 aa, Nicotiana tabacum
MGEQTQVQAKPETQTPPQPQPQPNSDSTLVSNSPVDLPPNPSNPSKIPIRPQKIRKLSSLPSSKTPQITASSATPASTKSRRKSTPKSSSRVLPQIIKPLSADGEIDNALLHLRSADPLLGSLIDTLPVPQFESYHSPFLALSKSILYQQLAYKAGTSIYTRFVSLCGGEDAVCPDVVLSLSAQQLKQIGVSGRKASYLYDLAHKYKNGILCDDALVKMDDKSLFTMLSMVKGIGSWSVHMFMIFSLHRPDVLPVSDLGVRKGVQLLYGLEELPRPSQMEQFCEKWRPYRSAGAWYMWRFVEEKGTPTTAAAAIDAGNVQPLQQIQTGQETQQHQLQLLEPINGIGNLGACIWSQ

SEQ ID NO: 47 - DNA, 873 bp, Oryza sativa
atggtcaagaccagagcggcggcgactccccgcccctccggcggcggcggcggcgcaggcgcagcggacatcaccgccggtaagatctccttccgctcccgcaagatcgtcaagagcacacccgccaaagggaaatccgtcgccacaacaacaacagccgtactatcgccaccgccgctgtcctcgccgggggagctcgcggcggcgctctcgcacctccgcaccgcggacccgctcctctccgaggtcatctcctccaccggcgccccggccttcatctcgtccccttcccgccccgccttccactccctcgcgcactccatcctccaccagcagctcgctccctccgccgccgccgccatctacgctcgcttcctcgcgctcatccccgccgccgctgatcccgatgccgcggtggtcaaccccgctgcggtgctcgccctctccgccgccgacctccgcgccatcggcgtctccgcccgcaaggcggcctacctccacgacctcgccggcaggttcgcggccggggagctctcggagtccgccgtggccgcaatggacgaggcggcgctcctcgcggagctcaccaaggtgaagggcgtcggcgagtggacggtccacatgttcatgatcttctcgctgcaccgccccgatgtgctgccatccggcgacctcggcgtgcgcaagggcgtgcaggagctgtacgggctgccggcgctgccgaagccggaggagatggcggcgctgtgtgagcggtggaggccgtaccggtcggtgggcgcgtggtacatgtggcgcctcatggagagcaagggcgccgcggccaagaaggcgaagagcaatgccattgccactttgccatcgagttgctag

SEQ ID NO: 48 - protein, 290 aa, Oryza sativa
MVKTRAAATPRPSGGGGGAGAADITAGKISFRSRKIVKSTPAKGKSVATTTTAVLSPPPLSSPGELAAALSHLRTADPLLSEVISSTGAPAFISSPSRPAFHSLAHSILHQQLAPSAAAAIYARFLALIPAAADPDAAVVNPAAVLALSAADLRAIGVSARKAAYLHDLAGRFAAGELSESAVAAMDEAALLAELTKVKGVGEWTVHMFMIFSLHRPDVLPSGDLGVRKGVQELYGLPALPKPEEMAALCERWRPYRSVGAWYMWRLMESKGAAAKKAKSNAIATLPSSC

SEQ ID NO: 49 - DNA, 1005 bp, Oryza sativa
atggaatcacccaacccccaacaggtcaattccatgggcgaccaatcccccctctcccccaacctccaccccctctccccgtcgccctccgccgccgccgccgccgccgccactcctacccccgcagccgccgccgcctcctcccgctcgtcgcgctccaagaagccgccgcactcctccgaccccaaccaatccaagaagccccggctgacgctgaccgtccccggccgccccctctccgccgacggcgaggtggccgcggccatccagcacctgcgcgccgccgacccggccctcgccaccgtcatcgacgcccacgaccccccggccttccagtgcccgcaccgccccttccactccctcgtccgatccatcctctaccagcagctcgccttcaaggccgccgcctccgtctactcccgcttcctctccctcctcggcggcgagcacaacgtcctccccgaggccgtcctcgccctcaccacccaggacctccgccagatcggggtctcccctcgcaaggcctcctacctccacgacctcgcccgcaagtatgcctccgggatcctctccgacgccgccgtcgtcaacatggacgaccgctccctcgccgccatgctcaccatggtcaagggcattggcgcatggagcgtccacatgttcatgatcttctccctcaatcgccccgacgtgctccccgccgccgaccttggggtgcgcaagggcgtgcagcatctctacggtctcgacgccgtgccccggccgtcgcagatggagaagctatgcgagcaatggcgcccttaccgctctgttggggcatggtacatgtggcggctcatcgaatccaaggcgccgccgccgccgccggccatccctgtcgggccgcctgcactgactgaacatggcgatgagctcatgctccagcagcagcagcatcagcaacagcagcaacagagtgtcatccaaatgattgatcctcttcagatgctcccagggatgggttga

SEQ ID NO: 50 - protein, 334 aa, Oryza sativa
MESPNPQQVNSMGDQSPLSPNLHPLSPSPSAAAAAAATPTPAAAAASSRSSRSKKPPHSSDPNQSKKPRLTLTVPGRPLSADGEVAAAIQHLRAADPALATVIDAHDPPAFQCPHRPFHSLVRSILYQQLAFKAAASVYSRFLSLLGGEHNVLPEAVLALTTQDLRQIGVSPRKASYLHDLARKYASGILSDAAVVNMDDRSLAAMLTMVKGIGAWSVHMFMIFSLNRPDVLPAADLGVRKGVQHLYGLDAVPRPSQMEKLCEQWRPYRSVGAWYMWRLIESKAPPPPPAIPVGPPALTEHGDELMLQQQQHQQQQQQSVIQMIDPLQMLPGMG

SEQ ID NO: 51 - DNA, 918 bp, Physcomitrella patens
atgaggacatcaggacctctgagcagtggtggagtggggcgggtgttgcgatcgcacacttcgaaagccctgccggtctcgaagattacgttgaaggtgaagacgggggcgaagaagggaaacactggtgcgggagctgtggcggagctggagaagaagcacaagacgagcatcaccacgagaatcgtttctaaaacagaggtaaaactgggggctagtacgagtccaaccaaaatagacgacctcactgtcacaatttcggatcgttcgtggacggttacgctatcatcagcggacgccatagcagaagcaacgaagcacttgctcgcagccgatgcaaacctcgcgtgcgtcattcagaaatcgaatagcccaccgtttgaaaatgatggcaacagcttcgctgctttggttcgaagcattgtgagccagcagcttgccgtgaaggctgccgctacaatccacgcacgcctcgttgcactatgcgggggcccacagaaagtgacgcctgcggccatcgctgccctgacagcaggagaactacgaggagcagggatctcaggtcggaaggaagtgtatctccatgacctagcagacaagttggtgtcaggagcactatcggatgagaagctcatggcgatggaggacgaggacgatctggtgacagcattgaccgctgtcaagggcatcggggtctggtccgcgcacatgttcatgatctttcacttgcatcgaccagatgtgcttcctgttggcgacttgggcatccgtaaaggcttccagaaactgttccacctcaagcacttgccatgcgccgaggagatgcacaagctcgccgattcctggcgaccatatcgatctcttgcatcgtggtacctctggcaactcaaagacgcaacaacagccttgaacaggtag

SEQ ID NO: 52 - protein, 305 aa, Physcomitrella patens
MRTSGPLSSGGVGRVLRSHTSKALPVSKITLKVKTGAKKGNTGAGAVAELEKKHKTSITTRIVSKTEVKLGASTSPTKIDDLTVTISDRSWTVTLSSADAIAEATKHLLAADANLACVIQKSNSPPFENDGNSFAALVRSIVSQQLAVKAAATIHARLVALCGGPQKVTPAAIAALTAGELRGAGISGRKEVYLHDLADKLVSGALSDEKLMAMEDEDDLVTALTAVKGIGVWSAHMFMIFHLHRPDVLPVGDLGIRKGFQKLFHLKHLPCAEEMHKLADSWRPYRSLASWYLWQLKDATTALNR

SEQ ID NO: 53 - DNA, 1116 bp, Poncirus trifoliata
atggtcgagcaaacccagtcccaaacccagaaccaacccgaacctcaacccgaacccgaaacgcagcctccaccgaaccaggattccactactaccctcgccgtcattccggtccaaacggaaaccgctaacaacgcaaccattacccatgctaatgttacgccccagacatcatcccctccgtcaaaaattccgttacgtcctcgaaaaatccgaaaactctcccccgataatggagtcgaccaaaccagttcatctcaaccaaccgaatcgtcgaaagccacatcagcgaaatccacaaaatcccgagccattcaacatcaacaacaaaccctaactcttcccagaattatcgctcggccgttatcgtccgaaggcgaagtcgaagctgcgattcgccatctccgtaacgcggatcgacagttagcttcgttaattgacatccacccgcctccgactttcgattcctttcacactccgtttttagccctaactcgcagcatcctttatcagcagttagctttcaaagctggcacatcgatttatacgcgcttcatcgcgctttgtggtggtgaagctggagtcgttccagagacggtccttgctttgacccctcaacagctgcgacaaattggggtctcaggccggaaggcgagttatcttcacgatctcgcgagaaaataccagaatggaatactgtctgactccgcgattgtaaatatggatgataaatcgctcttcacgatgcttacaatggttaatggaatcggctcatggtcggtacacatgttcatgattttctcgctgcatagaccggatgttttgccgattaacgatcttggtgtgaggaaaggagttcagttgctgtacagtttggaggagttgccaaggccgtcacagatggaccagttgtgtgagaagtggaggccatataggtctgtggcttcgtggtatctgtggaggtttgtggaagccaagggagcaccttctagtgcggcggcagtggcggctggtgctgcattgccgcagccacagcaggaggagcagcagcagcctcagcttttggatcagataaatagccttatcaacattggggcctgtgcttggggacaataa

SEQ ID NO: 54 - protein, 371 aa, Poncirus trifoliata
MVEQTQSQTQNQPEPQPEPETQPPPNQDSTTTLAVIPVQTETANNATITHANVTPQTSSPPSKIPLRPRKIRKLSPDNGVDQTSSSQPTESSKATSAKSTKSRAIQHQQQTLTLPRIIARPLSSEGEVEAAIRHLRNADRQLASLIDIHPPPTFDSFHTPFLALTRSILYQQLAFKAGTSIYTRFIALCGGEAGVVPETVLALTPQQLRQIGVSGRKASYLHDLARKYQNGILSDSAIVNMDDKSLFTMLTMVNGIGSWSVHMFMIFSLHRPDVLPINDLGVRKGVQLLYSLEELPRPSQMDQLCEKWRPYRSVASWYLWRFVEAKGAPSSAAAVAAGAALPQPQQEEQQQPQLLDQINSLINIGACAWGQ

SEQ ID NO: 55 - DNA, 1110 bp, Ricinus communis
atgggagaggaaacccaacctcaacctcaaccccaaccccaaccccaaacccaaacccaaacccaatcccagccccaaccccagtcccaatccgaatctcaatctcatccccaatcacaaatccggacgcaggttctaaaccatcaaccttcacatgactccgccactagcactatcgctacctctgaattaatatgtattcctcagccaacggccactcctccggccaaaatccctccttcccgtcctcgtaagctccgtaaactttccccggaatccgccgcaaaatccaccaaaacaaaaacaccccaaccgcgagctctagcggtggcccctccacgtatcatcgcgaggtcactctcgtgcgaaggcgaagtagagaatgcaattcggcatcttcgcgaagccgatccacttctctcatccttaattgacctccatcctccgcctaccttcgatacctttcacactcctttccttgctttgactcgcagtatactttaccagcagctggcttttaaagccggaacttcaatctacactcgttttatttctttatgtggtggagaggctggtgtggttcctgatacagttcttgccttgactccccaacaacttcgtcaaattggggtttccgggcggaaagcaagttatcttcatgatcttgctagaaagtatcacaatgggattttatcagattcggcaattgtaaatatggatgataaatctctttttactatgcttactatggttaatgggattggttcttggtctgtgcatatgtttatgattttctctttgcatagacccgatgtgttgcctattaatgatcttggagtccggaaaggagtgcaattgctttataatttggaggacttgcctcgcccttctcagatggatcaactgtgcgagaaatggaggccgtatagatctgttgcttcttggtatctttggagatttgttgaggcaaagggctcgccttccagtgctgtggcagtggcaactggtgctgctttgacacaacaacaccaggaggatcatcagcaaccgcaacttcttgatccaattaatagcattctcaacctcggggcctgtgcatggggacaatga

SEQ ID NO: 56 - protein, 369 aa, Ricinus communis
MGEETQPQPQPQPQPQTQTQTQSQPQPQSQSESQSHPQSQIRTQVLNHQPSHDSATSTIATSELICIPQPTATPPAKIPPSRPRKLRKLSPESAAKSTKTKTPQPRALAVAPPRIIARSLSCEGEVENAIRHLREADPLLSSLIDLHPPPTFDTFHTPFLALTRSILYQQLAFKAGTSIYTRFISLCGGEAGVVPDTVLALTPQQLRQIGVSGRKASYLHDLARKYHNGILSDSAIVNMDDKSLFTMLTMVNGIGSWSVHMFMIFSLHRPDVLPINDLGVRKGVQLLYNLEDLPRPSQMDQLCEKWRPYRSVASWYLWRFVEAKGSPSSAVAVATGAALTQQHQEDHQQPQLLDPINSILNLGACAWGQ

SEQ ID NO: 57 - DNA, 882 bp, Sorghum bicolor
atggggcggccggcgcgctcccgatctccggccatcgagccgcctccggaggtcactggccttcgctcctccaagatctccttccgctcccgtaagattgtcaagacaccatccgcgaaacctttggccacgaccgccctcgcaccactgccgccggcacctccgcctccagtgcttcctgcgctgtcgtcccccggagagcttgcggccgcgctgagccacctccaagccgcggaccccctcctcgccgcggtcattgcctccactgaggcgcccaccttcgccgccaccccctccctccccgcgttccactccctcgcgcgctccatcctctaccagcagctcgcgccctccgctgcggatgccatctacgctcgcttcctcgcgctcctcccctctgcttcggcggcggccgcgaacgtagccgctgacgcggtcacagtcacacccgccgccgtccttgccctcgccgccgccgacctgcgtaccatcggcgtctccggccgtaaggcatcctacctacacgacctcgcggccagattcgcagccggggagctctctgactccgccgtcgctgccatggatgaggctgcgctcctcgcggagctcaccaaggtcagaggcgtcggcgagtggactgtccacatgttcatgatcttctcactgcaccgccccgacgtgctgccgtgcggcgacctcggtgtgcgcaagggcgtgcaggagctgtacaatctcaaggggctccccaatccggaggagatggtggcattgtgcgagcggtggaggccgtacaggtcagtcggcgcgtggtacatgtggcgcctcatggagagtaagggcgctgcggccaagaagaagaataagggtaatgcgagttcttag

SEQ ID NO: 58 - protein, 293 aa, Sorghum bicolor
MGRPARSRSPAIEPPPEVTGLRSSKISFRSRKIVKTPSAKPLATTALAPLPPAPPPPVLPALSSPGELAAALSHLQAADPLLAAVIASTEAPTFAATPSLPAFHSLARSILYQQLAPSAADAIYARFLALLPSASAAAANVAADAVTVTPAAVLALAAADLRTIGVSGRKASYLHDLAARFAAGELSDSAVAAMDEAALLAELTKVRGVGEWTVHMFMIFSLHRPDVLPCGDLGVRKGVQELYNLKGLPNPEEMVALCERWRPYRSVGAWYMWRLMESKGAAAKKKNKGNASS

SEQ ID NO: 59 - DNA, 1017 bp, Sorghum bicolor
atgggcgagcaatccctctcccagcccaagccccagcctctctccccgccaccgtcgcctcccgcatccgccgcatcgccagccccagccccagccccgccccccgcctctgcctctgccgcttccacctcccgcaccaccagagcctcggcctcgcgccccaagaaggaggcgaacgcatcgccagaccccaacccgtccaagaagccccgcctgacgttctcgatcccgggccggccgggccggcccctgtccgcggccggtgaggtgggcgtggccatccgccacctgcgcgtcgcggaccccgccctcgccgccgtcatcgacgcgcacgagccgcctgtgttccagtgcccgcaccgcccgttccactccctcgtccgatccatcctgtaccagcagctcgccttcaaggccgccgcctccgtctactcccggttcctctcgctcctcggcggcgaggccggcgtggcccccgacgccgtcctcgcgctcaccccgcaccagctccgccagatcggggtctccccgcgcaaggcgtcctacctccacgacctcgcccgcaagtatgccgacggtatcctctccgactccgccgtcgtcaacatggacgaccgatccctcgccgccatgctcaccatggtcaagggcatcggcgcctggagcgtccacatgttcatgatcttctccctcgcgcgccccgacgtgctcccctctgccgacctcggcgtgcgcaagggcgtgcagatgctctacgccctcgaagacgtgcctcgcccctcgcagatggacaagctgtgcgagcggtggcgcccctaccgctcggttggggcctggtacatgtggcggctcattgagtccaaggtgccccagccggcgccggccatccctgtcggatcacttgccctcccgtcgccggacggccagattatgctacagcagcagcagcagcagcaacagcagcagactgtcatccaaatgatcgacccccttcagatgctcccagggatggggtga

SEQ ID NO: 60 - protein, 338 aa, Sorghum bicolor
MGEQSLSQPKPQPLSPPPSPPASAASPAPAPAPPPASASAASTSRTTRASASRPKKEANASPDPNPSKKPRLTFSIPGRPGRPLSAAGEVGVAIRHLRVADPALAAVIDAHEPPVFQCPHRPFHSLVRSILYQQLAFKAAASVYSRFLSLLGGEAGVAPDAVLALTPHQLRQIGVSPRKASYLHDLARKYADGILSDSAVVNMDDRSLAAMLTMVKGIGAWSVHMFMIFSLARPDVLPSADLGVRKGVQMLYALEDVPRPSQMDKLCERWRPYRSVGAWYMWRLIESKVPQPAPAIPVGSLALPSPDGQIMLQQQQQQQQQQTVIQMIDPLQMLPGMG

SEQ ID NO: 61 - DNA, 1107 bp, Solanum tuberosum
atgagtgaacagaccctaactccaccccaaccccaacctcaacctcaacctcaacctcaacctcaacctctacctcaacctctacccatttctgattccacccttgtatcgaactctccagttgaccttccaccaaacccctctaacccttccaaaatcccaattcgaccacagaaaatccgaaaactctcttccaccccatcctccaatgggaaaaccccggaaaccaccgtaccatcagcatccactgcaaccagcggagcgattaccgtaacgaagaatcgtcggaagagtgcaccgaaatcatcaagggttttgccccaaatcatcaaacccttatcagctgatggagagattgacaatgcactgcagcatctccgttctgtggaccctcttcttgtttccttaatagatacacttccttcccctcaatttgagttgcaccattctgcgtttttagcccttagcaagagcattctttatcagcaactagcttataaagcaggcacgtcaatctacactcgctttgtgtcactttgtggaggagaggacgctgtttgccccgacattgtcctctccctttctcctcaacagctcaagcaagtaggaatctcagggcggaaggctagttatcttcatgacttggcaaacaagtatagaagtgggattttgtcggatgaaactcttgtaaagatggatgataggtcattgtttaccatgctttcaatggtgaagggtattggttcttggtcagtgcacatgttcatgatcttttcacttcatagaccagatgttttgcctgttagtgacttgggggtcaggaaaggtgtgcaattgctgtatggactggaggaactgccaagaccgtcgcagatggagcaattatgtgacaaatggaagccatatagatctgcaggggcatggtatatgtggcggttagtggaagggaaagggactccaactactgcagcagcaccaattgacggtggtaatgtgcaggcattgcagcaatttccgacagaacaggagacacagcaacatcaactgcagcttctcgagccaattaatggcatcgaaaatcttggggcttgcatttggagccaatga

SEQ ID NO: 62 - protein, 368 aa, Solanum tuberosum
MSEQTLTPPQPQPQPQPQPQPQPLPQPLPISDSTLVSNSPVDLPPNPSNPSKIPIRPQKIRKLSSTPSSNGKTPETTVPSASTATSGAITVTKNRRKSAPKSSRVLPQIIKPLSADGEIDNALQHLRSVDPLLVSLIDTLPSPQFELHHSAFLALSKSILYQQLAYKAGTSIYTRFVSLCGGEDAVCPDIVLSLSPQQLKQVGISGRKASYLHDLANKYRSGILSDETLVKMDDRSLFTMLSMVKGIGSWSVHMFMIFSLHRPDVLPVSDLGVRKGVQLLYGLEELPRPSQMEQLCDKWKPYRSAGAWYMWRLVEGKGTPTTAAAPIDGGNVQALQQFPTEQETQQHQLQLLEPINGIENLGACIWSQ

SEQ ID NO: 63 - DNA, 867 bp, Theobroma cacao
atgaaccctccgccgcaaaccaccactatcaccaccagaagtaccgtcaggaaactttgtggaaacccttcaacgccctccaaaatcccatttcgaccacgcaaaatccgaaaagtgatctccaacacccccgtcgacaacgcaaccaagtctcctcaaccttcactcacggttgctcccaaaatcccaaaatctctatcaacaaaacccgaaatcgacctcgctcttaaccatctccgcacctcagatcctcttctcgccgccctcatttccgcccaccccccaccgaaactctctccttgtaactcctactttgtctccctttccaaatccattctcttccaacaactcaccaccaaagccgccaactcgatctacactcgcttcgtttccctctgcggaaacgaatccaacgtcctcccgaacacagtcctctcacttaccccacaaaagctccgtgaaatcggggtctcggttcgcaaggcaagctatctccacgacctttcggacaagttttcaactgggtttctgtcggatacttccatccttacaatggacgatgaaacgttgttccaaatgttgacagctgtcaaaggaatcgggccttggtcggtccacatgtttatgatattttcacttcataggcccgatgttttgcctgttggggatcttggagtgaggaaaggagtccagtttctgtacgggttaaaggagctgccgaagccattacaagtggagcagatttgtgagaagtggaagccttacagatctgttgggtcgtggtatatgtggaggcttgtggaagccaaacccaaagggaatgggaaagctcaaactgttgaagctgaacaaaatggagggttttaa

SEQ ID NO: 64 - protein, 288 aa, Theobroma cacao
MNPPPQTTTITTRSTVRKLCGNPSTPSKIPFRPRKIRKVISNTPVDNATKSPQPSLTVAPKIPKSLSTKPEIDLALNHLRTSDPLLAALISAHPPPKLSPCNSYFVSLSKSILFQQLTTKAANSIYTRFVSLCGNESNVLPNTVLSLTPQKLREIGVSVRKASYLHDLSDKFSTGFLSDTSILTMDDETLFQMLTAVKGIGPWSVHMFMIFSLHRPDVLPVGDLGVRKGVQFLYGLKELPKPLQVEQICEKWKPYRSVGSWYMWRLVEAKPKGNGKAQTVEAEQNGGF

SEQ ID NO: 65 - DNA, 909 bp, Vitis vinifera
atgagatatcataaaacttacatactaaagagagatgggtctggtttctctctcaactcagactcagtctcagtttcaggctctctgatgggtgagcaaacccaaacccaaactactcagccaccctcttctttacccgagaatccatcgccggcgaagtcccggaagctgtcctctcactcttctccacggacggcggccattttgctgccaattacgagactgttgtcttctgatgatgttgtcgctgccgctctccgccacctgagaagctccgacccggttcttgctccggtgatagatgcgtatgagccaccgaaattcgagaattcggacactccgtttctggctttagcgaagagcattttataccagcaaattacgcacaaggctggcaccaccatttacaaccgctttgtgtcgctctgcggcggggagactagggtttgtccaatctcggttctggcgctgacccctccgcagcttcttcaaattggggtttcggctcggaaagtgagcttcttgcacgaccttgcgaacaagtatcggaccggaattttatcggattcgaagattttgacgatggaagatagggctttggtttcattgatagcgatggtgaagggttttggcgtgttgtccgtacacatgttcatgatcttctctcttcaccgccccgatgtgcttccggtgggcgacgctaatctccgaaaaggggttcaaatgctctacggtcttgaagaattgccgcggccttcgcagatggagaagctctgcgagcggtggaggccttataggtctgttgcttcttggtatatatggagactaagtgaggccaatggagttcagggcaaggctgaatccggagaaactggtgctggatcgcctaagggacctgcaacaacttga

SEQ ID NO: 66 - protein, 302 aa, Vitis vinifera
MRYHKTYILKRDGSGFSLNSDSVSVSGSLMGEQTQTQTTQPPSSLPENPSPAKSRKLSSHSSPRTAAILLPITRLLSSDDVVAAALRHLRSSDPVLAPVIDAYEPPKFENSDTPFLALAKSILYQQITHKAGTTIYNRFVSLCGGETRVCPISVLALTPPQLLQIGVSARKVSFLHDLANKYRTGILSDSKILTMEDRALVSLIAMVKGFGVLSVHMFMIFSLHRPDVLPVGDANLRKGVQMLYGLEELPRPSQMEKLCERWRPYRSVASWYIWRLSEANGVQGKAESGETGAGSPKGPATT

SEQ ID NO: 67 - DNA, 1008 bp, Zea mays
atgggcgagcaatccctctcccagcccaagccccagcctctctccccgttcccgtcgcctcccgcctccgccgcgttgccgccccccgcctctgcctctgcctctgcctctgcctctgctgcctccacctcccgcaccaccagcgccgcggcctcgcgccccaagaagaaggtgacgaacccatcgcccgaccgtaacccggcaaagaagccccgcctgacgttctcgatcccgggccggcccctgtccgcagtcggcgaggtgggcgtggccatccgctacctgcgcgccgcggaccccgccctcgccgccgtcatcgacgcgcacgagccccccgtgttccagtgcccgcaccgcccgttccactccctcgtccgatccatcctgtaccagcagctcgccttcaaggccgccgcctccgtctactcccgcttcctcgcgcttctcggcggcgagtcctgcgtggcccccgatgccgtcctcgcgctcaccccgcaccagctccgccagatcggggtctccccgcgcaaggcttcctacctccacgacctcgcccgcaagtatgcctccgggatcctctccgacgccgccatcgtcaacatggacgaccgctccctcgccgccatgctcaccatggtcaagggcatcggctcctggagcgtccacatgttcatgatcttctctctcgcgcgccccgacgtgctcccctccgccgacctcggcgtgcgcaagggcgtgcagatgctctacgccctcgaggacgtgcctcgtccgtcgcagatggacaagctgtgcgagcggtggcgcccctatcgctcagttggggcttggtacatgtggcggctcattgaatccaaggtgccccagccggcgccagccatccctgttggatcacttgctttcccttcgccggacggccagagtatgctacagcagcaagaacaacagcaacagcagactgtcatccaaatgatcgacccccttcagatgctcccagggatggggtga

SEQ ID NO: 68 - protein, 335 aa, Zea mays
MGEQSLSQPKPQPLSPFPSPPASAALPPPASASASASASAASTSRTTSAAASRPKKKVTNPSPDRNPAKKPRLTFSIPGRPLSAVGEVGVAIRYLRAADPALAAVIDAHEPPVFQCPHRPFHSLVRSILYQQLAFKAAASVYSRFLALLGGESCVAPDAVLALTPHQLRQIGVSPRKASYLHDLARKYASGILSDAAIVNMDDRSLAAMLTMVKGIGSWSVHMFMIFSLARPDVLPSADLGVRKGVQMLYALEDVPRPSQMDKLCERWRPYRSVGAWYMWRLIESKVPQPAPAIPVGSLAFPSPDGQSMLQQQEQQQQQTVIQMIDPLQMLPGMG

SEQ ID NO: 69 - DNA, 984 bp, Zea mays
atgggcgagcaaacccactcccagactctctcctccacgcctcccgtctccgcctccgcctccgcctccgcctccgccgcgttacctgccacgaccagggcctcggaccccgcctctgccgcctccacctcccgcgccagcgccgcggcctcccgcgccagcgccgcggcctcccgcctcaagaagaaggaggcgaacgcatcgcccgaccccaacccggccaagaagcaccgcctgacgttctcgatcccgggccagcccctgtccgcggccggcgaggtgggcgtggccatccgccacctgcgcgccgtggaccccgccctcgccgccgtcatcgacgcgcacgagccccccgtgttccagtgcccgcaccgcccgttccactccctcgtacgatccatcctgtaccagcagctcgccttcaaggccgccgcctccgtctactcccgcttcctcgcgctcctcggcggcgaggccagcgtggcccccgacgccgtcctcgcgctcagcccgcaccagctccgccagatcggggtctccccgcgcaaggcgtcctacctccacgacctcgcccgcaagtatgcctcagggatcctctccgacgcctcgatcgtcaacatggacgaccgctccctcgccgccatgctcactatggtcaagggcatcggcgcctggagcgtccacatgttcatgatcttctccctcgcgcgccccgacgtgctcccctccgccgacctcggcgtgcgcaagggcgttcagatgctctacgccctccaagacgtgcctcgcccctcgcagatggacaggctgtgcgagcggtggcgcccctaccgctctgttggggcctggtacatgtggcggctcattgagtccaaggtgccccagccggcgccgcccatccctgccctcccttcgccggacggccagattatgctacagcagcagcagcagcaatctgtcatccaaatgatcattcccttttag

SEQ ID NO: 70 - protein, 327 aa, Zea mays
MGEQTHSQTLSSTPPVSASASASASAALPATTRASDPASAASTSRASAAASRASAAASRLKKKEANASPDPNPAKKHRLTFSIPGQPLSAAGEVGVAIRHLRAVDPALAAVIDAHEPPVFQCPHRPFHSLVRSILYQQLAFKAAASVYSRFLALLGGEASVAPDAVLALSPHQLRQIGVSPRKASYLHDLARKYASGILSDASIVNMDDRSLAAMLTMVKGIGAWSVHMFMIFSLARPDVLPSADLGVRKGVQMLYALQDVPRPSQMDRLCERWRPYRSVGAWYMWRLIESKVPQPAPPIPALPSPDGQIMLQQQQQQSVIQMIIPF

SEQ ID NO: 71 - DNA, 876 bp, Zea mays
atggggcgaccggcgcgctcccgttctccagccacagagccgcctccggcggtcaccggccttcgctcctccaagatctcctttcgctcccgtaagatcgtcaagacagcatccgcgaaacctttggccacgaccgccctggcactagcgccgcaggcgcctccgcctccagtgcttcctgcgctgtcgtcccccggagagcttgcggccgcgctgcgccacctccaagccgcggaccctctcctcaccgcggtcattgccaacactgaggcgcccaccttcaccgccacaccctccctccccgcgttccactccctcgcgcgctccatcctataccagcagctcgcgacctccgctgcggacgccatctacgcacgcttccttgcgctcctcccctctgcttcggcggcggccgcagccgtagccgctgacgcggtcacacctgccgccgtccttgccctcgccgccgctgacctgcgtaccatcggcgtatccggccgcaaggcatcctacctccacgacctcgcggccagattcgcagccggggagctctctgactccgcagtcgccgcgatggatgaggctgcgctcctcgcggagctcaccaaggtcagaggcgtcggcgagtggactgtccacatgttcatgatcttctcgctgcaccgccccgacattctgccgtgtggcgacctcggtgtgcgcaagggcgtgcaggagctgtacaagctcaagtcgctgcccaatccggaggagatggcagcattgtgcgagcggtggaggccataccggtcagtcggcgcgtggtacatgtggcgcctcatggagagcaagggcgctgcgtccaagaagaagaataagggtaatgcgagctcttag

SEQ ID NO: 72 - protein, 291 aa, Zea mays
MGRPARSRSPATEPPPAVTGLRSSKISFRSRKIVKTASAKPLATTALALAPQAPPPPVLPALSSPGELAAALRHLQAADPLLTAVIANTEAPTFTATPSLPAFHSLARSILYQQLATSAADAIYARFLALLPSASAAAAAVAADAVTPAAVLALAAADLRTIGVSGRKASYLHDLAARFAAGELSDSAVAAMDEAALLAELTKVRGVGEWTVHMFMIFSLHRPDILPCGDLGVRKGVQELYKLKSLPNPEEMAALCERWRPYRSVGAWYMWRLMESKGAASKKKNKGNASS

SEQ ID NO: 73 - protein, 15 aa, Artificial sequence
  motif 1
  VARIANT (9)..(9): Xaa can be Phe or Asn
WSVHMFMIXSLHRPD

SEQ ID NO: 74 - protein, 15 aa, Artificial sequence
  motif 2
  VARIANT (1)..(1): Xaa can be Lys or Arg
  VARIANT (9)..(9): Xaa can be Gly or Ala
  VARIANT (10)..(10): Xaa can be Ser or Ala
  VARIANT (13)..(13): Xaa can be Met or Leu
XWRPYRSVXXWYXWR

SEQ ID NO: 75 - protein, 15 aa, Artificial sequence
  motif 3
  VARIANT (1)..(1): Xaa can be Ile or Phe
XGVSGRKASYLHDLA

SEQ ID NO: 76 - DNA, 2194 bp, Oryza sativa
aatccgaaaagtttctgcaccgttttcaccccctaactaacaatatagggaacgtgtgctaaatataaaatgagaccttatatatgtagcgctgataactagaactatgcaagaaaaactcatccacctactttagtggcaatcgggctaaataaaaaagagtcgctacactagtttcgttttccttagtaattaagtgggaaaatgaaatcattattgcttagaatatacgttcacatctctgtcatgaagttaaattattcgaggtagccataattgtcatcaaactcttcttgaataaaaaaatctttctagctgaactcaatgggtaaagagagagattttttttaaaaaaatagaatgaagatattctgaacgtattggcaaagatttaaacatataattatataattttatagtttgtgcattcgtcatatcgcacatcattaaggacatgtcttactccatcccaatttttatttagtaattaaagacaattgacttatttttattatttatcttttttcgattagatgcaaggtacttacgcacacactttgtgctcatgtgcatgtgtgagtgcacctcctcaatacacgttcaactagcaacacatctctaatatcactcgcctatttaatacatttaggtagcaatatctgaattcaagcactccaccatcaccagaccacttttaataatatctaaaatacaaaaaataattttacagaatagcatgaaaagtatgaaacgaactatttaggtttttcacatacaaaaaaaaaaagaattttgctcgtgcgcgagcgccaatctcccatattgggcacacaggcaacaacagagtggctgcccacagaacaacccacaaaaaacgatgatctaacggaggacagcaagtccgcaacaaccttttaacagcaggctttgcggccaggagagaggaggagaggcaaagaaaaccaagcatcctccttctcccatctataaattcctccccccttttcccctctctatataggaggcatccaagccaagaagagggagagcaccaaggacacgcgactagcagaagccgagcgaccgccttctcgatccatatcttccggtcgagttcttggtcgatctcttccctcctccacctcctcctcacagggtatgtgcctcccttcggttgttcttggatttattgttctaggttgtgtagtacgggcgttgatgttaggaaaggggatctgtatctgtgatgattcctgttcttggatttgggatagaggggttcttgatgttgcatgttatcggttcggtttgattagtagtatggttttcaatcgtctggagagctctatggaaatgaaatggtttagggatcggaatcttgcgattttgtgagtaccttttgtttgaggtaaaatcagagcaccggtgattttgcttggtgtaataaagtacggttgtttggtcctcgattctggtagtgatgcttctcgatttgacgaagctatcctttgtttattccctattgaacaaaaataatccaactttgaagacggtcccgttgatgagattgaatgattgattcttaagcctgtccaaaatttcgcagctggcttgtttagatacagtagtccccatcacgaaattcatggaaacagttataatcctcaggaacaggggattccctgttcttccgatttgctttagtcccagaattttttttcccaaatatcttaaaaagtcactttctggttcagttcaatgaattgattgctacaaataatgcttttatagcgttatcctagctgtagttcagttaataggtaatacccctatagtttagtcaggagaagaacttatccgatttctgatctccatttttaattatatgaaatgaactgtagcataagcagtattcatttggattattttttttattagctctcaccccttcattattctgagctgaaagtctggcatgaactgtcctcaattttgttttcaaattcacatcgattatctatgcattatcctcttgtatctacctgtagaagtttctttttggttattccttgactgcttgattacagaaagaaatttatgaagctgtaatcgggatagttatactgcttgttcttatgattcatttcctttgtgcagttcttggtgtagcttgccactttcaccagcaaagttc

SEQ ID NO: 77 - DNA, 53 bp, Artificial sequence
  primer: prm13988
ggggacaagtttgtacaaaaaagcaggcttaaacaatgggcgaacaaaccaaa

SEQ ID NO: 78 - DNA, 50 bp, Artificial sequence
  primer: prm13989
ggggaccactttgtacaagaaagctgggtctcctcatcctaggtcccaat

SEQ ID NO: 79 - DNA, 4033 bp, Artificial sequence
  expression cassette
attatcgcgcgcggtgtcatctatgttactagatccgatgataagctgtcaaacatgagaattcctttcgtcgacccacgtgttgctgaggtatttaaataatccgaaaagtttctgcaccgttttcaccccctaactaacaatatagggaacgtgtgctaaatataaaatgagaccttatatatgtagcgctgataactagaactatgcaagaaaaactcatccacctactttagtggcaatcgggctaaataaaaaagagtcgctacactagtttcgttttccttagtaattaagtgggaaaatgaaatcattattgcttagaatatacgttcacatctctgtcatgaagttaaattattcgaggtagccataattgtcatcaaactcttcttgaataaaaaaatctttctagctgaactcaatgggtaaagagagagattttttttaaaaaaatagaatgaagatattctgaacgtattggcaaagatttaaacatataattatataattttatagtttgtgcattcgtcatatcgcacatcattaaggacatgtcttactccatcccaatttttatttagtaattaaagacaattgacttatttttattatttatcttttttcgattagatgcaaggtacttacgcacacactttgtgctcatgtgcatgtgtgagtgcacctcctcaatacacgttcaactagcaacacatctctaatatcactcgcctatttaatacatttaggtagcaatatctgaattcaagcactccaccatcaccagaccacttttaataatatctaaaatacaaaaaataattttacagaatagcatgaaaagtatgaaacgaactatttaggtttttcacatacaaaaaaaaaaagaattttgctcgtgcgcgagcgccaatctcccatattgggcacacaggcaacaacagagtggctgcccacagaacaacccacaaaaaacgatgatctaacggaggacagcaagtccgcaacaaccttttaacagcaggctttgcggccaggagagaggaggagaggcaaagaaaaccaagcatcctccttctcccatctataaattcctccccccttttcccctctctatataggaggcatccaagccaagaagagggagagcaccaaggacacgcgactagcagaagccgagcgaccgccttctcgatccatatcttccggtcgagttcttggtcgatctcttccctcctccacctcctcctcacagggtatgtgcctcccttcggttgttcttggatttattgttctaggttgtgtagtacgggcgttgatgttaggaaaggggatctgtatctgtgatgattcctgttcttggatttgggatagaggggttcttgatgttgcatgttatcggttcggtttgattagtagtatggttttcaatcgtctggagagctctatggaaatgaaatggtttagggatcggaatcttgcgattttgtgagtaccttttgtttgaggtaaaatcagagcaccggtgattttgcttggtgtaataaagtacggttgtttggtcctcgattctggtagtgatgcttctcgatttgacgaagctatcctttgtttattccctattgaacaaaaataatccaactttgaagacggtcccgttgatgagattgaatgattgattcttaagcctgtccaaaatttcgcagctggcttgtttagatacagtagtccccatcacgaaattcatggaaacagttataatcctcaggaacaggggattccctgttcttccgatttgctttagtcccagaattttttttcccaaatatcttaaaaagtcactttctggttcagttcaatgaattgattgctacaaataatgcttttatagcgttatcctagctgtagttcagttaataggtaatacccctatagtttagtcaggagaagaacttatccgatttctgatctccatttttaattatatgaaatgaactgtagcataagcagtattcatttggattattttttttattagctctcaccccttcattattctgagctgaaagtctggcatgaactgtcctcaattttgttttcaaattcacatcgattatctatgcattatcctcttgtatctacctgtagaagtttctttttggttattccttgactgcttgattacagaaagaaatttatgaagctgtaatcgggatagttatactgcttgttcttatgattcatttcctttgtgcagttcttggtgtagcttgccactttcaccagcaaagttcatttaaatcaactagggatatcacaagtttgtacaaaaaagcaggcttaaacaatgggcgaacaaaccaaaatccaacctcaatcacaaccagtccaatcagaatcccaggctctcccccaaatcgaagcccaggtccaaactcaatcactgtctcagccattcaatacccccaccaccaccacctcggaattaaccactgttccaccaccaatcacatctcctcccgccaaaatcccttcccgtcctcgtaaaatccgtaaagtctcacccaatgctgctgccaccaccgctaacgaccctaattcttccccaacctccaccactaccacaactgaaacacccaaaagccctgccatcaaaaccccaagaacaaaaacgtcccaacagctagtaatcgccactccgcggatcgtggcaagatctctaacatgtgaaggtgagcttgaatacgcaattcactatctccgtaacgccgatccactccttgcttccttaattgacatctaccagcctcctagctttgatacgttccccactcctttccttgctctcgctcgcagcattctttaccagcaacttgcttttaaagcagggtcttcaatttacacgcgctttatttcgctttgtggtggagaggctggagttttacccgaaacagttcttgctttgactccacaacagttgaggcaatttggggtttctgggcgtaaagcgagttaccttcatgatctagctagaaagtatcgaaatggtattttatcggattctgcgattgtaaatatggatgatagatcgctttttacaatgcttactatggtaaatgggattggttcatggtcagtgcatatgttcatgattttctcgctgcatagaccggatgtgctgccaattaatgatcttcaagtgaggaaaggggtgcagttgctttataatttgccggagttgccacgcccatcacagatggatcagttgtgtgaaaaatggaggccgtataggtcggttgcgtcatggtatctttggagattacaagagtcaaaagggtcaccttccagtgtgatagcagtgtctactagtggtaatttgacacagcaacagcaggaagaccagcagcagcctcagcttattgacccaataaacagcattctcaatcttggggcctgtgcttggggacaatgattgggacctaggatgaggagacccagctttcttgtacaaagtggtgatatcacaagcccgggcggtcttctagggataacagggtaattatatccctctagatcacaagcccgggcggtcttctacgatgattgagtaataatgtgtcacgcatcaccatgggtggcagtgtcagtgtgagcaatgacctgaatgaacaattgaaatgaaaagaaaaaaagtactccatctgttccaaattaaaattggttttaaccttttaataggtttatacaataattgatatatgttttctgtatatgtctaatttgttatcatccgggcggtcttctagggataacagggtaattatatccctctagacaacacacaacaaataagagaaaaaacaaataatattaatttgagaatgaacaaaaggaccatatcattcattaactcttctccatccacttccatttcacagttcgatagcgaaaaccgaataaaaaacacagtaaattacaagcacaacaaatggtacaagaaaaacagttttcccaatgccataatactcgactc

SEQ ID NO: 80 - DNA, 1634 bp, Populus trichocarpa
atgagagaagcgaaacgtatcactcttcgattggcgattgtgttgttgttagctttcgtttctttcaatcagctctttgctgacgatgatacgatctttcatgagacgtttgacgagtcgttcagtggaagatggattgtttcggagaaagaagactataaaggggtgtggaagcgtgaaaagagtgagggacatgatgattatggacttcttgtgagtgagccggctaagaagtatgccattgtgaaggaactcgatgagcctgtgagtcttaaggatggaattgtcctccaatttgagactcgccttcagagtgggcttgaatgtggtggtgcgtatttgaaatatctccgaccacaggaggctgggtgggtgcccaaggggtttgacagtgagtctccttattcgattatgtttggacctgacaaatgtggtaccacaaacaaggttcattttatcttgaagcataaaaacccaaagagtggggagtatgttgagcatcacctcaagttcccaccttccgttccacacgacaagcttactcatgtgtacacagccatcttgaaatctgacaatgagttgcaaattctggttgatggagaggagaagaagaaggcaaacttcctcacatctgatgattttgagcccccacttgtccctgccaagacaattcctgatccagatgacgtgaaacctgaggattgggatgagagagcaaaaattcctgatcctgaggcagcgaagccagaggactgggacgaggatgcacctcttgaaattgtagatgaggatgctgtgaaacctgaagggtggttggatgatgagcctgaggagattgatgatcctgaagctacaaaaccagaagattgggatgaagaggaggatggtgaatgggaggcacccaagactgataacccaaagtgtgaggaagcccctggttgtggtgaatggaagaaaccaatgaagagaaatccagcatacaagggaaaatggcatgctccacttattgacaaccccaactacaagggtatttggaagcctcaggatattccaaaccccgactactttgagcttgaccagcctgactttgagcccattgctgctgttggtattgagatctggacaatgcaggatggcatattgtttgacaatatcctggttgcaaaggatgagaaggctgcagcttcaattagggatacaacatggaagccaaagtttgatgctgagaaggagaaacagaaggctgaggaagcagctactggcactgatggtcttgctggcttccagaagaaggtgttcgaactcctataccaggctgctgagctctctttcctaagcaagcacaaggacaaaattattgaactcatcgagaaggcagagaaacaaccgaacatcacaattggtgtccttgtctccgttgtggtggtgatccttactcttttcttcaggataatttttggtggaaagaaggctaaggtggagaagaaacctgagccagttgcggagacatccaacaaggaaggaagcagcagcggcgatgagaagaaagaagagactgaggccgagaatgaagctgctgctcctgctcgcaggaggccatcgaggcgtgagaactgaaagatgagatcagaggg

SEQ ID NO: 81 - protein, 538 aa, Populus trichocarpa
MREAKRITLRLAIVLLLAFVSFNQLFADDDTIFHETFDESFSGRWIVSEKEDYKGVWKREKSEGHDDYGLLVSEPAKKYAIVKELDEPVSLKDGIVLQFETRLQSGLECGGAYLKYLRPQEAGWVPKGFDSESPYSIMFGPDKCGTTNKVHFILKHKNPKSGEYVEHHLKFPPSVPHDKLTHVYTAILKSDNELQILVDGEEKKKANFLTSDDFEPPLVPAKTIPDPDDVKPEDWDERAKIPDPEAAKPEDWDEDAPLEIVDEDAVKPEGWLDDEPEEIDDPEATKPEDWDEEEDGEWEAPKTDNPKCEEAPGCGEWKKPMKRNPAYKGKWHAPLIDNPNYKGIWKPQDIPNPDYFELDQPDFEPIAAVGIEIWTMQDGILFDNILVAKDEKAAASIRDTTWKPKFDAEKEKQKAEEAATGTDGLAGFQKKVFELLYQAAELSFLSKHKDKIIELIEKAEKQPNITIGVLVSVVVVILTLFFRIIFGGKKAKVEKKPEPVAETSNKEGSSSGDEKKEETEAENEAAAPARRRPSRREN

SEQ ID NO: 82 - DNA, 1299 bp, Arabidopsis lyrata
atggcgaaattaatcactagcctcgtctctctgattcttatcggtctcgtcgtcgcctccgcggcagttatcttcgaagagcgcttcgatgatggatgggaaagcagatgggttaaatctgagtggaagaaggatgataacactgctggggagtggaaacacactgctggaaattggtctggtgactctaacgataaaggtatccagactagtgaggactacagattctacgccatttcagctgagttccctgaattcagtaacaaggacaaaaccttagtcttccagttctcagtcaagcacgagcaaaagcttgactgtggtggtggctacatgaagctgctcagtggtgatgttgaccagaagaaatttggtggagacaccccatacagtatcatgtttggtcccgatatctgtggctacagcacaaagaaagtgcatgctatccttacctacaatgaagccaaccacctgatcaagaaggatgttccatgtgaaactgatcagcttacccatgtgtacaccttcatcctccgcccagatgcaacttacagcattctcatcgacaatgttgagaagcaaacgggtagcctttactctgactgggatcttctcccacccaagaagatcaaggaccccagcgccaagaagcctgaggattgggacgaccaagaatacattgctgaccctgaagacaagaaacctgacgggtacgatgatatcccaaaggagatcccagacaccgactcaaagaagcctgaggactgggatgatgaagaagatggtgagtggactgccccgaccatccccaatcctgagtacatgggtgaatggaagcctaagcaaatcaagaaccccaactacaagggcaagtggaaggctccagtgattgacaaccctgacttcaaggatgacccagagctctatgtcttccccaagctgaagtatgttggactcgaattgtggcaggtgaaatcaggatcgctgtttgataatgtcttgatctgcgatgacccagactacgccaagaagttggcagatgaaacatggggaaagctcaaggatgcagaaaaagcagcttttgatgaggctgagaagaagaatgaggaagaggaatccaaggacgcacctgcagattctgatgctgaagaggaaccagaggatgatgatggagatgaatcagattctgaatctaaggctgaggagagcaaatcagaagttagcgaggaaactgctgagaaagacgctaccgctcatgtatgttaccataatgtcacattaatattttaccatccttaa

SEQ ID NO: 83 - protein, 432 aa, Arabidopsis lyrata
MAKLITSLVSLILIGLVVASAAVIFEERFDDGWESRWVKSEWKKDDNTAGEWKHTAGNWSGDSNDKGIQTSEDYRFYAISAEFPEFSNKDKTLVFQFSVKHEQKLDCGGGYMKLLSGDVDQKKFGGDTPYSIMFGPDICGYSTKKVHAILTYNEANHLIKKDVPCETDQLTHVYTFILRPDATYSILIDNVEKQTGSLYSDWDLLPPKKIKDPSAKKPEDWDDQEYIADPEDKKPDGYDDIPKEIPDTDSKKPEDWDDEEDGEWTAPTIPNPEYMGEWKPKQIKNPNYKGKWKAPVIDNPDFKDDPELYVFPKLKYVGLELWQVKSGSLFDNVLICDDPDYAKKLADETWGKLKDAEKAAFDEAEKKNEEEESKDAPADSDAEEEPEDDDGDESDSESKAEESKSEVSEETAEKDATAHVCYHNVTLIFYHP

SEQ ID NO: 84 - DNA, 1590 bp, Arabidopsis lyrata
atgagacaacggcaactattttccggctttttgcttctcttagctttcgtttcgttccagaagctttgctactgtgacgatcaaacggttctttatgagtctttcgatgagccttttgatggtcgctggatcgtttcgaagaatagtgattacgaaggtgtatggaagcatgcaaagagtgaaggacatgaagattatggacttctcgtgagtgagaaggctagaaagtatgggattgtgaaagagcttgacgagcctctaaacctcaaggagggaactgttgttcttcagtacgaggttcgtttccaggaaggacttgagtgtggaggtgcttacttgaagtacctccgtcctcaagaagctggatggacacctcagggattcgatagtgaatccccttactctatcatgtttgggcctgacaagtgtggagctacaaacaaagtgcatttcatcttaaagcacaagaatcccaagagtggcgagtacgttgaacaccatctgaagttccctccctctgttccttatgacaagctttcccatgtctacaccgccatcttgaaacccgacaacgaggttaggattttggttgatggagaggagaagaaaaaggccaatttactctctggtgaagactttgagcctgcattgatccctgccaagaccatccctgaccctgaagacaagaaaccagaagactgggacgaaagagccaagattcccgatccaaatgccgtgaaacctgatgactgggatgaggatgcacccatggagatcgaagatgaggaagctgagaaacccgaaggatggttagatgatgagcctgaggaggtcgatgaccccgaagcgaccaagcctgaagattgggatgatgaggaagatggtatgtgggaggctcctaagattgacaaccccaaatgtgaagcagcaccaggttgtggtgaatggaagagaccaatgaagaggaatcctgcttacaagggaaaatggagttcacctcttattgataacccggcttacaagggaatctggaaacccaaagatattcctaaccctgactactttgagctagacagacccgattacgaacccattgcagccatcggtattgagatctggacaatgcaagatggtatcttgtttgacaacatcttgatagcgaaggacgagaaggtcgctgagacttacagacagaccacttggaagcccaaattcgatgttgagaaagagaaacaaaaggcagaagaggaagctgctggctctgcagatggtctcaagagctaccagaaggttgttttcgacctcttgaacaaggttgcagatttatctttcctaagtgcctacaagtctaagatcacggaactgattgagaaagctgagcaacaaccaaacttaaccattggtgtcctcgtctccattgtggttgtattcttctcgctcttcctcaagcttatctttggtggcaaaaaggcggcacctgtggaaaagaagaaaccagaagtagcagagagttcaaagagtggggatgaggcggagaagaaggaagaaaccgcggcaccacgcaaaaggcaaccgagacgtgataattag

SEQ ID NO: 85 - protein, 529 aa, Arabidopsis lyrata
MRQRQLFSGFLLLLAFVSFQKLCYCDDQTVLYESFDEPFDGRWIVSKNSDYEGVWKHAKSEGHEDYGLLVSEKARKYGIVKELDEPLNLKEGTVVLQYEVRFQEGLECGGAYLKYLRPQEAGWTPQGFDSESPYSIMFGPDKCGATNKVHFILKHKNPKSGEYVEHHLKFPPSVPYDKLSHVYTAILKPDNEVRILVDGEEKKKANLLSGEDFEPALIPAKTIPDPEDKKPEDWDERAKIPDPNAVKPDDWDEDAPMEIEDEEAEKPEGWLDDEPEEVDDPEATKPEDWDDEEDGMWEAPKIDNPKCEAAPGCGEWKRPMKRNPAYKGKWSSPLIDNPAYKGIWKPKDIPNPDYFELDRPDYEPIAAIGIEIWTMQDGILFDNILIAKDEKVAETYRQTTWKPKFDVEKEKQKAEEEAAGSADGLKSYQKVVFDLLNKVADLSFLSAYKSKITELIEKAEQQPNLTIGVLVSIVVVFFSLFLKLIFGGKKAAPVEKKKPEVAESSKSGDEAEKKEETAAPRKRQPRRDN

SEQ ID NO: 86 - DNA, 1257 bp, Arabidopsis lyrata
atggggaaactaaactctaaattcatctcgatcattctcttcgctctcgtggtaatcgtctcttctgaagttatattcgaggagcgattcgatgacggatgggagaagagatgggtaaaatccgactggaagaaagataacaacactgctggggaatggaaacacacagctggaaattggtctggtgacgctaacgataaaggtatccaaacaagcgaagacaacagattctacgctatatcatctgaattccctgagttcagcaacaaggacaagaccctagtcttccaattctctgtcaagcatgaacagaagcttgactgtggtggtggttacatgaagttgcttagtggtgatgttgaccagaaaaatttcggaggagacactccttacagtattatgtttggccctgataaatgtggtgacaacactaagaaagtacatgctattcttacatacaatggaacaaaccatttgatcaagaaggaggtcccatgtgagactgaccagcttactcatgtgtacaccttcgtcctccgtccagatgctacttatagtattttgattgacaatgttgagaagcaaactggtagcctctcctctgactgggatctcctcccagcaaagaagattaaggatccaagtgccaagaagcctgaggactgggatgacaaaaagtacattcctgatccggaagacactaagccagcgggatacgatgacatccctaaggagattccagacactgatgcaaagaagcctgaagattgggatgatgaaaaatctggtgagtggactaccccaaccattcctaatccggagtacaagggtgtatggaagcccaagaaaatcaagaaccctaattacaagggcaagtggaaggctccaatgatcgacaaccctgatttcaaggatgacccagaactatatgtcttccccaaattgaaatatgttggggtggagttgtggcaggtgaaatctggatccttgttcgacaatgtattggtaagcgatgacccagagtacgctaagaagttggccgaagaaacatggggaaagaacaaggatgcggaggaagcagcatttgaagaagcagagaagaaaagacaggaagaggaatcaaaggaacttctcgctgaagttgaatctgacgataaggaagaagctgaaaatgatgacaatgaaggagatgactcggacaacaaatcgaagtttgaggaaactaaggagttcgatgccgctcatgacgagctctaa

SEQ ID NO: 87 - protein, 418 aa, Arabidopsis lyrata
MGKLNSKFISIILFALVVIVSSEVIFEERFDDGWEKRWVKSDWKKDNNTAGEWKHTAGNWSGDANDKGIQTSEDNRFYAISSEFPEFSNKDKTLVFQFSVKHEQKLDCGGGYMKLLSGDVDQKNFGGDTPYSIMFGPDKCGDNTKKVHAILTYNGTNHLIKKEVPCETDQLTHVYTFVLRPDATYSILIDNVEKQTGSLSSDWDLLPAKKIKDPSAKKPEDWDDKKYIPDPEDTKPAGYDDIPKEIPDTDAKKPEDWDDEKSGEWTTPTIPNPEYKGVWKPKKIKNPNYKGKWKAPMIDNPDFKDDPELYVFPKLKYVGVELWQVKSGSLFDNVLVSDDPEYAKKLAEETWGKNKDAEEAAFEEAEKKRQEEESKELLAEVESDDKEEAENDDNEGDDSDNKSKFEETKEFDAAHDEL

SEQ ID NO: 88 - DNA, 1272 bp, Arabidopsis lyrata
atgggattacctcaaaataagctcagttttttctgccgctttctcttttctgtgctcactattgctccgttggctttctccgagatcttcttagaggagcatttcgaaggtggatggaaaagtaggtgggtcttgtctgattggaaaagaaacgaaggcaaagctggaacctttaagcacactgccggtaaatggcccggcgatcctgacgataaaggtattcagacctataatgatgccaagcattatgcgatctctgcaaagattcctgagtttagcaacaaaaaccggactcttgttgtccagtactcagtcaagattgaacaagatatagaatgtggtggtgcttacatcaagctcctctctggctatgttaaccagaagcagttcggtggtgatactccttacagtctaatgtttggaccagatatatgcggaacacagacgaagaaacttcatgttatactttcatatcagggacagaattatccaatcaaaaaggatttgcaatgtgaaacagacaaattaaatcatttctacacatttattctgcggcctgacgcttcctacagcgttctggtggacaataaagagagagagtttggtagtatgtacacagactgggacatccttcctccaaggaagataaaggtcaagaatgcaaagaagccagaggactgggatgatagagagtacatcgatgacccaaacgatgtcaaacccgagggttttgattctattccgcgtgaaattccagatcgtaaagctaaagagcccgaggactgggacgaggaagaaaacggtctctgggaacctccaaagatcccaaatcctgcatacaaaggtccttggaaagcaaagagaatcaagaacccgaactacaagggaaaatggaagaacccatggatagataatccagaatttgaagatgatccagatctttacgttctgaagcctataaaatatgcaggcattgaagtatggcaggtgaaggctggctctatctttgacaatatcttgatctgtgatgacccggaatatgctagaagcatcgtggatgactattttgcccagcacagagagtctgagaaggagttatttgcggaagctgagaaagaaagaaaagctagagaagatgaggaagctcggaaagcacgggaagaaggtgaacgaaggcggaaggaaagggaccaccggtatggagacaggaggaggcgttacaaacgaccgaatccacgtgattacatggatgattaccatgacgagctgtaa

SEQ ID NO: 89 - protein, 423 aa, Arabidopsis lyrata
MGLPQNKLSFFCRFLFSVLTIAPLAFSEIFLEEHFEGGWKSRWVLSDWKRNEGKAGTFKHTAGKWPGDPDDKGIQTYNDAKHYAISAKIPEFSNKNRTLVVQYSVKIEQDIECGGAYIKLLSGYVNQKQFGGDTPYSLMFGPDICGTQTKKLHVILSYQGQNYPIKKDLQCETDKLNHFYTFILRPDASYSVLVDNKEREFGSMYTDWDILPPRKIKVKNAKKPEDWDDREYIDDPNDVKPEGFDSIPREIPDRKAKEPEDWDEEENGLWEPPKIPNPAYKGPWKAKRIKNPNYKGKWKNPWIDNPEFEDDPDLYVLKPIKYAGIEVWQVKAGSIFDNILICDDPEYARSIVDDYFAQHRESEKELFAEAEKERKAREDEEARKAREEGERRRKERDHRYGDRRRRYKRPNPRDYMDDYHDEL

SEQ ID NO: 90 - DNA, 1275 bp, Arabidopsis lyrata
atggcgaaattagtcactagcatcgtctctctgattcttatcggtctcgtcgcgatcgcctccgcggctgttatcttcgaggagcgctttgatgatggatgggaaagcagatgggttaaatctgagtggaagaaggatgataacactgctggagagtggaaacacactgcgggaaattggtctggtgactctaacgataaaggtatccagaccagtgaggactacagattctacgccatttcagctgagttccctgaattcagtaacaaggacaaaaccttagtcttccaattctcagtcaagcacgagcaaaagcttgactgtggtggtggctacatgaagctgctcagtggtgatgttgaccagaagaaatttggtggagacaccccatacagtatcatgtttggtcccgatatctgtggctacagcacaaagaaagtgcatgctatccttacctacaatgaagccaaccacctgatcaagaaggatgttccatgtgaaactgatcagcttacccatgtgtacaccttcatcctccgcccagatgcaacttacagcattctcatcgacaatgttgagaagcaaacgggtagcctttactctgactgggatcttctcccacccaagaagatcaaggaccccagcgccaagaagcctgaggactgggacgaccaagaatacattgctgaccctgaagacaagaaacctgacggatacgatgatatcccaaaggagatcccagacaccgacgctaagaagcctgaggactgggatgatgaagaagatggtgagtggactgccccaaccatccccaaccctgagtacaatggtgaatggaagcctaagcaaatcaagaaccccaactacaagggcaagtggaaggctccattgattgataaccctgacttcaaggatgacccagagctctatgtcttccccaagctgaagtatgttggactcgaattgtggcaggtgaaatcaggatctctgtttgacaatgtcttgatctgcgatgacccagactatgccaagaagttggcagaggaaacatggggaaagctcaaggatgcggagaaagcagctttcgatgaggctgagaagaagaaggaggaagaggaatccaaggacgcacctgcggaatctgatgctgaagaggaaccagaggatgatgaaggagatgactccgattccgaatctaagacagatgaggagagcaaatcagaagttagcgaggaaactgccgagaaagacgccaccgctcatgatgagctgtaa

SEQ ID NO: 91 - protein, 424 aa, Arabidopsis lyrata
MAKLVTSIVSLILIGLVAIASAAVIFEERFDDGWESRWVKSEWKKDDNTAGEWKHTAGNWSGDSNDKGIQTSEDYRFYAISAEFPEFSNKDKTLVFQFSVKHEQKLDCGGGYMKLLSGDVDQKKFGGDTPYSIMFGPDICGYSTKKVHAILTYNEANHLIKKDVPCETDQLTHVYTFILRPDATYSILIDNVEKQTGSLYSDWDLLPPKKIKDPSAKKPEDWDDQEYIADPEDKKPDGYDDIPKEIPDTDAKKPEDWDDEEDGEWTAPTIPNPEYNGEWKPKQIKNPNYKGKWKAPLIDNPDFKDDPELYVFPKLKYVGLELWQVKSGSLFDNVLICDDPDYAKKLAEETWGKLKDAEKAAFDEAEKKKEEEESKDAPAESDAEEEPEDDEGDDSDSESKTDEESKSEVSEETAEKDATAHDEL

SEQ ID NO: 92 - DNA, 1275 bp, Arabidopsis thaliana
atgggattacctcaaaataagctcagttttttctgcttcttcttcctcgtctctgtactaactcttgccccattggctttctccgagatcttcttagaggagcatttcgaaggtggatggaaaagtaggtgggtcttgtctgattggaaaagaaacgaaggcaaagctggaacctttaagcacactgccggtaaatggcccggcgatcctgacaataaaggtattcagacttataatgatgccaagcattatgcgatttctgcaaagattcctgagtttagcaacaaaaaccggactcttgttgtccagtactcagtcaagattgaacaagacattgaatgtggtggtgcttacattaagctcctgtctggctatgttaaccagaagcagtttggtggtgatactccatacagtctaatgtttggaccagatatatgcggaacacagacgaagaagcttcatgttatagtttcatatcagggacagaattatccaatcaaaaaggatttgcaatgtgaaacagacaaattaaatcatttctacacatttattctgcgtcctgacgcttcttacagcgttctggtggataataaagagagagaatttggcagtatgtacacagactgggacatccttcctccaaggaagatcaaggtcaagaatgcaaagaagccagaggactgggatgatagagagtacatcgatgaccccaacgatgtcaaacccgagggttttgattctattccacgtgaaattccagatcgtaaagctaaagagcccgaggactgggacgaggaagaaaatggtctctgggaacctccaaagatcccaaattctgcgtacaaaggtccttggaaagcaaagagaatcaagaacccgaactacaagggaaaatggaagaacccatggatagataatccagaatttgaagatgatccagatctttacgttctgaagtctatcaaatatgcaggcattgaagtatggcaggtgaaggctggctcaatctttgacaatatattgatctgcgatgacccggcatatgcaagaagcatcgtggatgactattttgcccaacacagggagtctgagaaggagttatttgcggaagcagagaaagaaagaaaagctagagaagatgaggaagctcggatagcacgggaagaaggtgaacgcaggcggaaagaaagggaccaccggtatggagacaggaggaggcgttacaaacggccgaatccacgtgattatatggatgattaccatgacgagctatga

SEQ ID NO: 93 - protein, 424 aa, Arabidopsis thaliana
MGLPQNKLSFFCFFFLVSVLTLAPLAFSEIFLEEHFEGGWKSRWVLSDWKRNEGKAGTFKHTAGKWPGDPDNKGIQTYNDAKHYAISAKIPEFSNKNRTLVVQYSVKIEQDIECGGAYIKLLSGYVNQKQFGGDTPYSLMFGPDICGTQTKKLHVIVSYQGQNYPIKKDLQCETDKLNHFYTFILRPDASYSVLVDNKEREFGSMYTDWDILPPRKIKVKNAKKPEDWDDREYIDDPNDVKPEGFDSIPREIPDRKAKEPEDWDEEENGLWEPPKIPNSAYKGPWKAKRIKNPNYKGKWKNPWIDNPEFEDDPDLYVLKSIKYAGIEVWQVKAGSIFDNILICDDPAYARSIVDDYFAQHRESEKELFAEAEKERKAREDEEARIAREEGERRRKERDHRYGDRRRRYKRPNPRDYMDDYHDEL

SEQ ID NO: 94 - DNA, 1275 bp, Arabidopsis thaliana
atggcgaaaatgattcctagcctcgtctctctaattcttatcggtcttgttgcgatcgcctccgccgcagttattttcgaggagcgctttgatgatggctgggagaacagatgggttaaatctgagtggaagaaggatgataacactgctggggagtggaagcacactgcgggaaattggtctggtgacgctaacgataaaggtatccagaccagtgaagactacagattctacgccatttcagctgagttccctgaattcagtaacaaggacaagaccttagtcttccaattctcagtcaagcacgagcaaaagcttgactgcggtggtggctacatgaagctactaagtggtgatgttgaccaaaagaaatttggtggagacacaccatacagtatcatgtttggtcctgatatctgtggctacagcacaaagaaagtgcatgctatccttacctataatgaagccaaccacctgatcaagaaagatgttccatgtgaaactgaccagctcacccatgtgtacacatttatcctccgcccagatgctacttacagcattctcatcgacaatgttgagaaacaaactggtagcctttactctgactgggatcttctcccacccaagaagatcaaggaccccagcgccaagaagcctgaggactgggacgaacaagaatacatttctgaccctgaagacaagaaacctgacggttacgatgatatccctaaggagatcccagacaccgactcaaagaagcctgaggactgggatgatgaagaagatggtgagtggactgccccaacaatccccaaccctgagtacatgggtgaatggaagcctaagcaaatcaagaaccccaactacaagggcaagtgggaggctccattgattgacaaccctgacttcaaggatgacccagagctctacgtcttccccaagctgaaatatgttggactcgaattgtggcaggtgaaatcaggatcattgttcgacaatgtcttgatctgcgatgacccagactatgccaagaagttggcagatgaaacatggggaaagctcaaggatgcggagaaagcagctttcgatgaggctgagaagaagaatgaggaagaggaatccaaggacgcacctgcggaatctgatgctgaagacgaaccagaggatgatgaaggaggagatgattccgattctgaatctaaggccgaggagaccaaatcagtagatagcgaggaaacctctgagaaagacgccaccgctcatgatgagctatag

SEQ ID NO: 95 - protein, 424 aa, Arabidopsis thaliana
MAKMIPSLVSLILIGLVAIASAAVIFEERFDDGWENRWVKSEWKKDDNTAGEWKHTAGNWSGDANDKGIQTSEDYRFYAISAEFPEFSNKDKTLVFQFSVKHEQKLDCGGGYMKLLSGDVDQKKFGGDTPYSIMFGPDICGYSTKKVHAILTYNEANHLIKKDVPCETDQLTHVYTFILRPDATYSILIDNVEKQTGSLYSDWDLLPPKKIKDPSAKKPEDWDEQEYISDPEDKKPDGYDDIPKEIPDTDSKKPEDWDDEEDGEWTAPTIPNPEYMGEWKPKQIKNPNYKGKWEAPLIDNPDFKDDPELYVFPKLKYVGLELWQVKSGSLFDNVLICDDPDYAKKLADETWGKLKDAEKAAFDEAEKKNEEEESKDAPAESDAEDEPEDDEGGDDSDSESKAEETKSVDSEETSEKDATAHDEL

SEQ ID NO: 96 - DNA, 1278 bp, Arabidopsis thaliana
atggcgaaactaaaccctaaattcatctctttgattcttttcgctctcgtggtgatcgtctctgctgaagttatcttcgaggagaaattcgaagatggatgggagaagagatgggtaaaatctgactggaagaaagatgataatactgctggggaatggaaacacacagctggaaattggtctggtgatgctaacgataaaggtatccaaactagcgaggactacagattctacgctatatcagctgaattccctgagtttagcaacaaggataagaccttagtcttccaattctctgtcaagcatgagcagaagcttgactgtggtggtggctacatgaagttgctaagtgatgatgttgaccagacgaaattcggaggagacactccttacagcattatgtttgggccagatatttgtggctacagcactaagaaagtacatgctatccttacttacaatggaaccaaccatttgatcaagaaggaggtcccatgtgagactgatcagcttactcacgtgtacaccttcgtcctccgtccagatgctacttacagtattttgattgataatgttgagaagcaaactggtagcctttactctgactgggatcttctcccagcaaagaagattaaggatccaagtgctaagaagcctgaggactgggatgacaaagagtacattccagatccagaagacactaagccagcgggatatgatgacatcccaaaggagattccagacactgacgcaaagaagcctgaggactgggatgatgaagaagatggtgagtggactgcccctaccattcccaaccccgagtacaatggtgaatggaagcccaagaaaattaagaaccccgcttacaagggcaagtggaaggctccaatgatcgacaaccctgaattcaaggatgacccagaactctatgtcttccccaaattgaagtatgttggagttgagttgtggcaggtgaaatctggttccttgttcgacaatgtcttggtcagcgatgacccagagtacgctaagaagttggccgaggaaacctggggaaagcacaaggatgcggagaaagcagcatttgacgaagctgagaagaagagagaggaagaggaatcaaaggatgctcctgctgaatccgacgctgaggaagaagcagaagatgatgacaatgaaggagatgactcagacaatgaatcaaagtctgaggaaaccaaggaggccgaggaaaccaaggaagccgaggaaaccgatgccgcccatgacgagctctaa

SEQ ID NO: 97 - protein, 425 aa, Arabidopsis thaliana
MAKLNPKFISLILFALVVIVSAEVIFEEKFEDGWEKRWVKSDWKKDDNTAGEWKHTAGNWSGDANDKGIQTSEDYRFYAISAEFPEFSNKDKTLVFQFSVKHEQKLDCGGGYMKLLSDDVDQTKFGGDTPYSIMFGPDICGYSTKKVHAILTYNGTNHLIKKEVPCETDQLTHVYTFVLRPDATYSILIDNVEKQTGSLYSDWDLLPAKKIKDPSAKKPEDWDDKEYIPDPEDTKPAGYDDIPKEIPDTDAKKPEDWDDEEDGEWTAPTIPNPEYNGEWKPKKIKNPAYKGKWKAPMIDNPEFKDDPELYVFPKLKYVGVELWQVKSGSLFDNVLVSDDPEYAKKLAEETWGKHKDAEKAAFDEAEKKREEEESKDAPAESDAEEEAEDDDNEGDDSDNESKSEETKEAEETKEAEETDAAHDEL

SEQ ID NO: 98 - DNA, 1599 bp, Arabidopsis thaliana
atgagagaacggattattacattcgtttcgctgcttcttgtagctttgctttcgtttcccagtgttagctactgtgacgaccaaacgatcctgtatgaatcgtttgacgagccttttgatggtcgctgggtcgtttcagagaaagctgaataccaaggtgtgtggaagcacgagaagagtgaagggcatgatgattatggacttctagtgagtgagaaagctaagaagtacggaatagttaaagagcttgatgttgatgagcctctaaaccttaacgaaggaactgttgttcttcaatacgaggctcgtttccaagaagggcttgagtgtggtggtgcttacttaaagtatcttcgtcctcaagaagctggatgggttcctcaagggtttgataatgattctccttactctatcatgtttggacctgataagtgtggtgctaccaacaaggttcatttcatcttgaagcataagaatcccaagagtggcgagtttgttgagcaccatctcaagttccctccttctgttccgtttgacatgctttctcatgtctacactgcggtcttgaaatctgataatgaggtgaggattttggtcgatggtgaggagaagaagaagggtaatttactgtctgctgaagactttgagcctccgttgattccttccaagaccatccctgatccagaggacaagaagccagaagactgggatgagagagccaagattcctgatcctaatgctgtgaagcctgatgactgggatgaggatgcacccatggagattgaagatgaggaagctgagaaacccgaaggatggttggatgatgagcctgtagaggttgaagaccccgaggcaagcaagccagaagattgggatgacgaggaagatggtgagtgggaggctcctaaggtttccaacaccaagtgtgaggcagcacccggatgtggcgaatggaagagaccgatgaagaggaaccctgcttacaagggcaaatggagctcacctctcatagataacccagcttacaagggaatctggaaaccaagagacattccaaatcctgattattttgagcttgagaggccgaatttggagcccattgctgccattggtattgagatatggacaatgcaagacggtatcttatttgacaacatcttgatatctaaagacgagaaggttgctgaaacttacagacaaagcacttggaagcccaagtttgatgtggagaaagagaaacaaaaggcagaggatgaagctgctggtgaggcagatggtctcaagagttaccagaagaaggtgttcgacctcttgtacaaggttgcagacatttctttccttagtgcgtacaagtcaaagattatggaacttattgagaaagctgaaacacagccaaacttaaccatcggtgtgctcatttccatcgtgatcgtcttcctctctctcttcttcaagctcatatttggtggtgcaaaggctaaggtagaaaagaagaaaccggaaacagctgcagagacctcgacaagcgaggcaaagacagaggagaaagcagaagcggtggctgcaccacgaaagaggcagacgaggcgtgagagttag

SEQ ID NO: 99 - protein, 532 aa, Arabidopsis thaliana
MRERIITFVSLLLVALLSFPSVSYCDDQTILYESFDEPFDGRWVVSEKAEYQGVWKHEKSEGHDDYGLLVSEKAKKYGIVKELDVDEPLNLNEGTVVLQYEARFQEGLECGGAYLKYLRPQEAGWVPQGFDNDSPYSIMFGPDKCGATNKVHFILKHKNPKSGEFVEHHLKFPPSVPFDMLSHVYTAVLKSDNEVRILVDGEEKKKGNLLSAEDFEPPLIPSKTIPDPEDKKPEDWDERAKIPDPNAVKPDDWDEDAPMEIEDEEAEKPEGWLDDEPVEVEDPEASKPEDWDDEEDGEWEAPKVSNTKCEAAPGCGEWKRPMKRNPAYKGKWSSPLIDNPAYKGIWKPRDIPNPDYFELERPNLEPIAAIGIEIWTMQDGILFDNILISKDEKVAETYRQSTWKPKFDVEKEKQKAEDEAAGEADGLKSYQKKVFDLLYKVADISFLSAYKSKIMELIEKAETQPNLTIGVLISIVIVFLSLFFKLIFGGAKAKVEKKKPETAAETSTSEAKTEEKAEAVAAPRKRQTRRES

SEQ ID NO: 100 - DNA, 1593 bp, Arabidopsis thaliana
atgagacaacggcaactattttccgtgtttttgcttctcttagctttcgtttcgttccagaagctttgctactgtgacgatcaaacggttctgtatgaatcgttcgatgagccttttgatggccgctggatcgtttcgaagaatagtgattacgaaggtgtatggaagcatgcaaagagtgaaggacatgaggattatggacttctcgtgagtgagaaggctaggaagtatggaattgtgaaagagcttgacgagcctctaaacctcaaggaaggaactgttgttcttcagtacgaggttcgtttccaggaaggacttgagtgtggtggtgcttacttgaagtacctccgtcctcaggaagctggatggacacctcagggattcgatagtgaatccccttactctatcatgtttgggcctgacaagtgtggaggtacgaacaaagtgcatttcatcttgaagcacaagaatcccaagagtggcgagtacgttgaacaccatctgaagttccctccctctgttccttatgacaagctttcccatgtctacaccgccatcttgaaacccgacaacgaggttagaattttggttgatggagaggagaagaaaaaggccaatttactctctggtgaagactttgagcctgcattgatccctgccaagaccatccctgaccctgaagacaagaaaccagaggattgggacgaaagagccaagattcctgatccaaatgccgtgaagcctgaggactgggatgaggatgcacctatggagattgaagatgaggaagctgagaaacccgaaggatggttagatgatgagcctgaggaggtcgacgaccccgaagcgaccaagcctgaagattgggatgatgaggaagatggtatgtgggaggctcctaaaattgacaaccccaagtgtgaagcagcacctggttgtggtgaatggaagagaccaatgaagaggaatcctgcttacaagggcaaatggagctcacctcttattgataacccggcttacaagggaatctggaaacccagagatatccctaaccctgactactttgagctagacagacccgattacgaacccattgcagccatcggtattgagatctggacaatgcaagatggtatcttgtttgacaacatcttgatagcgaaagacgagaaggtcgctgagacttacagacagaccacttggaagcccaaattcgatgttgagaaagagaaacaaaaggcagaagaggaagctgctggctctgcagatggtctcaagagctaccagaaggttgtattcgacctcttgaacaaggttgcagatttatctttcctaagtgcctacaagtctaagatcacggaactgattgagaaagccgagcaacaaccaaacttaaccattggtgtcctcgtcgccattgtggttgtattcttctcgctcttcctcaagcttatctttggtggcaaaaaggcggcggcacctgtggaaaagaagaaaccagaagtagcggagagttcaaagagtggggatgaggcggagaagaaggaagaaaccgcggcaccacgcaaaaggcaaccgagacgtgataattag

SEQ ID NO: 101 - protein, 530 aa, Arabidopsis thaliana
MRQRQLFSVFLLLLAFVSFQKLCYCDDQTVLYESFDEPFDGRWIVSKNSDYEGVWKHAKSEGHEDYGLLVSEKARKYGIVKELDEPLNLKEGTVVLQYEVRFQEGLECGGAYLKYLRPQEAGWTPQGFDSESPYSIMFGPDKCGGTNKVHFILKHKNPKSGEYVEHHLKFPPSVPYDKLSHVYTAILKPDNEVRILVDGEEKKKANLLSGEDFEPALIPAKTIPDPEDKKPEDWDERAKIPDPNAVKPEDWDEDAPMEIEDEEAEKPEGWLDDEPEEVDDPEATKPEDWDDEEDGMWEAPKIDNPKCEAAPGCGEWKRPMKRNPAYKGKWSSPLIDNPAYKGIWKPRDIPNPDYFELDRPDYEPIAAIGIEIWTMQDGILFDNILIAKDEKVAETYRQTTWKPKFDVEKEKQKAEEEAAGSADGLKSYQKVVFDLLNKVADLSFLSAYKSKITELIEKAEQQPNLTIGVLVAIVVVFFSLFLKLIFGGKKAAAPVEKKKPEVAESSKSGDEAEKKEETAAPRKRQPRRDN

SEQ ID NO: 102 - DNA, 1173 bp, Brachypodium distachyon
atgcccgccctcgcgaggtcgccgtccttcgccgtgctggccgtgctcgcgctcgccaccgccgtcgccggcgaggtcttcttccaggagaagttcgacgatggatgggtggatcggtgggtgaagtcggagtggaagaaggaggacaacacggccggcgagtggaaccacacttccggcaaatggaacggtgatgccgaggacaaagggatccagacctccgaggactacaggttctacgccatctcggcgcagttcccggagttgagcaacaaggacaagaccctggttctgcagttctccgtcaagcatgagcagaagctcgactgtggtggtggctatgtcaagctgctcggcgctgatattgaccagaagaagtttggcggcgagacaccttacagcattatgtttgggccggatatctgtgggtacgccaccaagaaggtgcatgctatcctcaccaagaatggcaagaaccatctgatcaagaaggaggtgccgtgcgagacagatcagctgacacatgtgtacacattgatcatccgtcctgatgccacttacagcattctaattgacaacgccgagaagcaaactggcagcatctatgatgactgggacattctccctgcaaagaagatcagggatcctgaagccaagaagccagaagattgggtagatgaggaatacattcctgatcctgaggataagaagccagagggttatgacgatattcccaaagaaattactgatcctgaggcaacgaagccggaggactgggacgatgaggaagatggtgaatggacagctccaaccatgccaaaccccgagtacaagggaccatggacgcaaaagaaaattaagaacccggaatacaagggcaaatggaaggcacctttgattgacaaccctgatttcaaggatgatccttacatctacgcttttgacagtttgaagcacattggcattgagctgtggcaggttaaatcgggaactctgtttgacaatatcctgatcacggatgaccctgagtacgccaagaaggtcgcagaggagacctgggccaagcacaaagatgctgagaaggccgcctttgacgaggctgagaagaagagactcgaggaggaatctgcaagcagcaaggatgatgaccttgatgacgatgaaagatgctaa

SEQ ID NO: 103 - protein, 390 aa, Brachypodium distachyon
MPALARSPSFAVLAVLALATAVAGEVFFQEKFDDGWVDRWVKSEWKKEDNTAGEWNHTSGKWNGDAEDKGIQTSEDYRFYAISAQFPELSNKDKTLVLQFSVKHEQKLDCGGGYVKLLGADIDQKKFGGETPYSIMFGPDICGYATKKVHAILTKNGKNHLIKKEVPCETDQLTHVYTLIIRPDATYSILIDNAEKQTGSIYDDWDILPAKKIRDPEAKKPEDWVDEEYIPDPEDKKPEGYDDIPKEITDPEATKPEDWDDEEDGEWTAPTMPNPEYKGPWTQKKIKNPEYKGKWKAPLIDNPDFKDDPYIYAFDSLKHIGIELWQVKSGTLFDNILITDDPEYAKKVAEETWAKHKDAEKAAFDEAEKKRLEEESASSKDDDLDDDERC

SEQ ID NO: 104 - DNA, 1608 bp, Brassica napus
atgatgagagaccggcagctattctccggccttatgcttatcctagctctcctctcgctccagaacctttgccactgcgacgataatacggtgttgtatgaatcgttcgatgaggcgtttgatggtcgctggatcgtttcgaagaatggtgattacgaaggtgtgtggaagcatgcgaagagtgagggacatgatgattacggacttctcgtaagcgagaaggctcgtaagtacggtatagtgaaggagcttgacgagcctctaaacctcaaggaaggaaccattgttcttcagtacgaggttcgtttccaggaagggcttgagtgtggtggtgcttacttgaagtacctccgtcctcaggaagctggatggacacctgaagggttcgatagcgaatctccttactctatcatgtttgggcctgacaagtgtggagccacaaacaaagttcatttcatcttgaaacacaagaacccaaagagcggcgagtacgttgagcaccatctcaagttccctccctctgttccttacgacaagctttcccatgtctacaccgctatcttgaagccagacaacgaggttaggattctggttgatggagaggagaagaagaaggctaatttactttctggggaggactttgagcctgcgttgatccctgccaagaccatccctgaccctgaagacaagaaaccagaagactgggatgagagagccaagatccctgatcctaacgccgtgaagcctgaagactgggacgaggaggcgcccatggagatcgaagacgaggaagctgagaaacccgaaggatggttagatgacgagcctgaggaggtggacgacccagaggcgaccaagcctgaagactgggatgatgaggaagatggtatgtgggaggctccaaagattgacaaccccaagtgtgaagcagcaccaggatgtggtgaatggaagagacccatgaagaagaatcctgcttacaagggcaaatggagtgcacctatgatagataaccctgcttacaagggaatctggaagcccagagacatccctaaccctgactactttgagctggacagacctgactacgaacccattgcggcaatcggtatagagatctggacgatgcaagacggtatcttgtttgacaacatgttgatagcgaaagacgagaaggtcgctgagagttacagacagacgacatggaagccgaagttcgatgttgagaaagagaaacaaaaggcggaagaggaggctgctagctctgctgatggtctcaagagctaccagaaggttgtgttcgacctcttgaacaaggttgcagacatttctttcctaagtgcctacaagtctaagatcacagaactgattgagaaagctgaggaacaaccaaacttaaccattggtgtcctagtctccattgtcgtagtattcttctcgctcttcatcaagcttatcttcggtggcaaaaaggcggcgccggcagcaaccgtggagaagaagaagaaaccagaagtaggagagagctcaaagagtgaagatgagacagagaagaaggaagaaaccgctgctgctcctcgcaaaaggcaaccgaggcgtgacaattag

SEQ ID NO: 105 - protein, 535 aa, Brassica napus
MMRDRQLFSGLMLILALLSLQNLCHCDDNTVLYESFDEAFDGRWIVSKNGDYEGVWKHAKSEGHDDYGLLVSEKARKYGIVKELDEPLNLKEGTIVLQYEVRFQEGLECGGAYLKYLRPQEAGWTPEGFDSESPYSIMFGPDKCGATNKVHFILKHKNPKSGEYVEHHLKFPPSVPYDKLSHVYTAILKPDNEVRILVDGEEKKKANLLSGEDFEPALIPAKTIPDPEDKKPEDWDERAKIPDPNAVKPEDWDEEAPMEIEDEEAEKPEGWLDDEPEEVDDPEATKPEDWDDEEDGMWEAPKIDNPKCEAAPGCGEWKRPMKKNPAYKGKWSAPMIDNPAYKGIWKPRDIPNPDYFELDRPDYEPIAAIGIEIWTMQDGILFDNMLIAKDEKVAESYRQTTWKPKFDVEKEKQKAEEEAASSADGLKSYQKVVFDLLNKVADISFLSAYKSKITELIEKAEEQPNLTIGVLVSIVVVFFSLFIKLIFGGKKAAPAATVEKKKKPEVGESSKSEDETEKKEETAAAPRKRQPRRDN

SEQ ID NO: 106 - DNA, 1605 bp, Brassica napus
atgatgagagaccggcagctattctccgccgttttgcttatcttagctttcgtttctctccagaagctttgctactgcgacgatcaaacggtgttgtatgaatcgttcgatgaggcatttgatggtcgctggatcgtctcgaagaatggcgattacgaaggtgtgtggaagcatgagaagagtgagggacatgatgattatggacttctcgtaagcgagaaggctcgtaagtatggtatagtgaaagttctcgacgagccactaaacctcaaggacggaaccattgttcttcagtacgaggttcgtttccaggaagggcttgagtgcggtggtgcttacttgaagtacctccgtcctcaggaagctggatggacacctgagggattcgatagtgaatctccttactctatcatgtttggacccgacaagtgtggagctacgaacaaagttcatttcatcttgaaacacaagaaccccaagagcggcgagtacgttgagcaccatctcaagttcccaccctctgttccttatgacaagctttcccatgtctacaccgccatcttgaagccagacaacgaggttaggattttggttgatggagaggagaagaagaaggccaacttactctctggggaagactttgagcctgctttgatccctgacaagaccatccccgaccctgaagacaagaaaccagaagactgggatgagagagccaagatccctgaccctaacgctgtgaagcctgacgactgggacgaggaagcaccgatggagatagaagatgaagaagccgagaaacccgaaggatggttagacgatgagcctgaggaggtggacgacccagaggcaaccaaacctgaagattgggatgatgaggaagatggtatgtgggaggctccaaagattgacaaccccaagtgtgaaacagcaccaggttgtggtgaatggaagagaccgatgaagaagaaccctgcttacaagggaaagtggagtgcacctatcatagataaccctgcttacaagggaatctggaaacccagagacatccctaaccctgactactttgagctagacagacccgattacgaacccattgcagctatcggtatagagatctggacgatgcaagacggtatcttgtttgacaacattttgatagcgaaagacgagaaggtcgctgagagttacagacagacaacgtggaagcctaagttcgatgttgagaaagagaaacaaaaggaggaagagaaggctgctgaatctgcagatggtcttaagagctaccagaaggttgtgttcgatctgttgaacaaggttgcagacatttctttcctaagtgcctacaagtccaagatcacagaattgattgagaaagctgaggaacaaccaaacttaaccattggtgtcctagtctccattgttatagtattcttctcgctcttcatcaagcttatcttcggtggcaaaaaggcgtcggcggcggcgagtgtggagaagaagaaaccagaagtaggagagagctcaaagagtggagatgagtcggagaagaaggaagaaaccgctgctgctccccgcaaaaggcaaccgagacgtgataattag

SEQ ID NO: 107 - protein, 534 aa, Brassica napus
MMRDRQLFSAVLLILAFVSLQKLCYCDDQTVLYESFDEAFDGRWIVSKNGDYEGVWKHEKSEGHDDYGLLVSEKARKYGIVKVLDEPLNLKDGTIVLQYEVRFQEGLECGGAYLKYLRPQEAGWTPEGFDSESPYSIMFGPDKCGATNKVHFILKHKNPKSGEYVEHHLKFPPSVPYDKLSHVYTAILKPDNEVRILVDGEEKKKANLLSGEDFEPALIPDKTIPDPEDKKPEDWDERAKIPDPNAVKPDDWDEEAPMEIEDEEAEKPEGWLDDEPEEVDDPEATKPEDWDDEEDGMWEAPKIDNPKCETAPGCGEWKRPMKKNPAYKGKWSAPIIDNPAYKGIWKPRDIPNPDYFELDRPDYEPIAAIGIEIWTMQDGILFDNILIAKDEKVAESYRQTTWKPKFDVEKEKQKEEEKAAESADGLKSYQKVVFDLLNKVADISFLSAYKSKITELIEKAEEQPNLTIGVLVSIVIVFFSLFIKLIFGGKKASAAASVEKKKPEVGESSKSGDESEKKEETAAAPRKRQPRRDN

SEQ ID NO: 108 - DNA, 1269 bp, Brassica napus
atggcgaaactaatccttggcctcgtatccttgattcttatcggactcgtcgcgatcgcttccgccgcagttatcttcgaggagcgctttgatgatggatgggagaacaggtgggttaaatctgagtggaagaaagatgaccagtctgctggggagtggaaccacacttctggaaattggtctggtgatgctaatgataaaggtatccagaccagtgaggactacagattctacgccatttcagctgagttccctgaattcagcaacaaggacaaaaccttagtcttccaattctcagtcaagcacgagcaaaagcttgactgtggtggtggctacatgaagctcctcagtggtgatgttgaccagaagaaatttggtggcgacactccatacagcatcatgtttggtcccgatatctgtggctacagcacgaagaaagtgcatgctatccttacctacaatgacgccaaccacctgatcaagaaggatgttccctgtgaaactgaccagctcacccatgtctacacattcatcctccgcccagatgctacttacagcattctcattgacaatgttgagaagcaaaccggtagcctgtactctgactgggatcttcttccacccaagaagatcaaggaccccagtgccaagaagcctgaggactgggacgagcaagagtacattccagaccctgaagacaagaaacctgacggatacgatgatatcccaaaggagatcccagataccgatgcaaagaagcctgaggactgggatgaagaagaagatggtgagtggactgccccgaccgttcccaaccctgagtacatgggtgaatggaagcccaagcaaatcaagaaccccaattacaagggcaagtgggaggctccagaaattgacaaccctgactttaagaatgactcagagctgtatgtcttccccaagctaaagtatgttggaatcgaattgtggcaggtgaaatcaggatcattgttcgacaatgttttgatctgcgatgacccagactacgccaagaagttggcagatgaaacatggggcaagctcaaggatgcggagaaagcagctttcgatgagattgagaagaagaaagaggaagaggaatccaaggacgctcctgcggaaactgatgctgaagatgaagcagaggaagatgaaggagatgagtctgacactgaagctaagaccgaagccaaatcagaagttagcgaggagacctcagacaaagacgccactgctcatgatgagctgtga

SEQ ID NO: 109 - protein, 422 aa, Brassica napus
MAKLILGLVSLILIGLVAIASAAVIFEERFDDGWENRWVKSEWKKDDQSAGEWNHTSGNWSGDANDKGIQTSEDYRFYAISAEFPEFSNKDKTLVFQFSVKHEQKLDCGGGYMKLLSGDVDQKKFGGDTPYSIMFGPDICGYSTKKVHAILTYNDANHLIKKDVPCETDQLTHVYTFILRPDATYSILIDNVEKQTGSLYSDWDLLPPKKIKDPSAKKPEDWDEQEYIPDPEDKKPDGYDDIPKEIPDTDAKKPEDWDEEEDGEWTAPTVPNPEYMGEWKPKQIKNPNYKGKWEAPEIDNPDFKNDSELYVFPKLKYVGIELWQVKSGSLFDNVLICDDPDYAKKLADETWGKLKDAEKAAFDEIEKKKEEEESKDAPAETDAEDEAEEDEGDESDTEAKTEAKSEVSEETSDKDATAHDEL

SEQ ID NO: 110 - DNA, 1605 bp, Brassica napus
atgatgagagaccggcagctattctccgccgttttgcttatcttagctttcgtttctctccagaagctttgctactgcgacgatcaaacggtgttgtatgaatcgttcgatgaggcgtttgatggtcgctggatcgtctcgaagaatggcgattacgaaggtgtgtggaagcatgagaagagtgagggacatgatgattatggacttctcgtaagcgagaaggctcgtaagtatggtatagtgaaagttctcgacgagccactaaacctcaaggacggaaccattgttcttcagtacgaggttcgtttccaggaagggcttgagtgcggtggtgcttacttgaagtacctccgtcctcaagaagctggatggacacctgagggattcgatagtgaatctccttactctatcatgtttggacccgacaagtgtggagctacgaacaaagttcatttcatcttgaaacacaagaaccccaagagcggcgagtacgttgagcaccatctcaagttcccaccctctgttccttatgacaagctttcccatgtctacaccgccatcttgaagccagacaacgaggttaggattttggttgatggagaggagaagaagaaggccaacttactctctggagaagactttgagcctgctttgatccctgacaagaccatccctgaccctgaagacaagaaaccagaagactgggatgagagagccaagatccctgaccctaacgccgtgaagcctgacgactgggacgaggatgcacccatggagatagaagatgaagaagccgagaaacccgaaggatggttagacgatgagcctgaggaggtggacgacccagaggcgaccaaacctgaagattgggatgatgaggaagatggtatgtgggaggcaccaaagattgacaaccccaagtgtgaagcagcaccaggatgcggtgaatggaagagaccgatgaagaagaaccctgcttacaagggcaaatggagtgcacctatgatagataaccctgcttacaagggaatctggaagcccagagacatccctaaccctgactactttgagctagacagacctgattacgaacccattgcagctatcggtatagagatctggacgatgcaagacggtatcttgtttgacaacattttgatagcgaaagacgagaaggtcgctgagagttacagacagacaacgtggaagcctaagttcgatgttgagaaagagaaacaaaaggaggaagagaaggctgctgaatctgcagatggtcttaagagctaccagaaggttgtgttcgatctgttgaacaaggttgcagacatttccttcctaagtgcctacaagtccaagaccacagaattgattgagaaagctgaggaacaaccaaacttaaccattggtgtcctagtctccattgttatagtattcttctcgctcttcatcaagcttatcttcggtggcaaaaaggcgtcggcggcggcgagtgtggagaagaagaaaccagaagtaggagagagctcaaagagtggagatgagtcggagaagaaggaagaaaccgctgctgctccccgcaaaaggcaaccgagacgtgataattag

SEQ ID NO: 111 - protein, 534 aa, Brassica napus
MMRDRQLFSAVLLILAFVSLQKLCYCDDQTVLYESFDEAFDGRWIVSKNGDYEGVWKHEKSEGHDDYGLLVSEKARKYGIVKVLDEPLNLKDGTIVLQYEVRFQEGLECGGAYLKYLRPQEAGWTPEGFDSESPYSIMFGPDKCGATNKVHFILKHKNPKSGEYVEHHLKFPPSVPYDKLSHVYTAILKPDNEVRILVDGEEKKKANLLSGEDFEPALIPDKTIPDPEDKKPEDWDERAKIPDPNAVKPDDWDEDAPMEIEDEEAEKPEGWLDDEPEEVDDPEATKPEDWDDEEDGMWEAPKIDNPKCEAAPGCGEWKRPMKKNPAYKGKWSAPMIDNPAYKGIWKPRDIPNPDYFELDRPDYEPIAAIGIEIWTMQDGILFDNILIAKDEKVAESYRQTTWKPKFDVEKEKQKEEEKAAESADGLKSYQKVVFDLLNKVADISFLSAYKSKTTELIEKAEEQPNLTIGVLVSIVIVFFSLFIKLIFGGKKASAAASVEKKKPEVGESSKSGDESEKKEETAAAPRKRQPRRDN

SEQ ID NO: 112 - DNA, 1269 bp, Brassica napus
atggcgaaattaacgcttagcgtcatctccgtggttcttatcggtctcgtcgcgatcgcttccgccgcggttatcttcgaggagcgctttgatgatggatgggagaacagatgggttaaatcagagtggaagaaagaggacaagtctgctggggagtggagccacactgctggaaactggtctggtgatgctaacgataaaggtatccagaccagtgaggactacagattctacgccatctcagctgagttccctgaattcagcaacaaggacaagaccttagtcttccaattctcagtcaagcacgagcagaagcttgactgtggtggtggctacatgaagcttctcagtggtgatgttgaccagaagaaatttggtggtgacaccccatacagcatcatgtttggtcccgatatctgtgggtacaccacgaagaaagtgcatgctatccttacctacaatgacgccaaccacctgatcaagaaggatgttccgtgtgaaactgaccagctcacccatgtctacacgttcatcctccgcccagatgctacttacaccattctcattgacaatgttgagaagcaaaccggtagcctgtacgctgattgggatcttctcccacccaagaagatcaaggaccccaacgccaagaagcctgaggactgggacgagcaagagtacattccagaccctgaagacaagaaacctgacggatacgatgatatcccaaaggagatcccagataccgatgcaaagaagcctgaggactgggatgaagaagaagatggtgagtggactgcccctaccattcccaaccctgagtacatgggtgaatggaagcccaagcaaatcaagaaccccaactacaagggcaagtgggaggctccagagattgacaaccctgacttcaaggacgacccagagctctatgtcttccccaagctgaagtatgttggaatcgaattgtggcaggtgaaatcaggatcattgttcgacaatgtcttgatctgcgatgacccagactacgccaagaagttggcagaagaaacatggggaaagctcaaggatgcggagaaagcagcttttgatgagattgagaagaagaaagaggaagaggaatccaaggacgctcctgcggaaactgatggtgaagatgaagcagaggaagatgaaggagaggaatcagatactgaatcaaagacagaggccaaatcagaagttagcgaggaaaccgctgagaaagacgccaccgctcatgatgaactgtaa

SEQ ID NO: 113 - protein, 422 aa, Brassica napus
MAKLTLSVISVVLIGLVAIASAAVIFEERFDDGWENRWVKSEWKKEDKSAGEWSHTAGNWSGDANDKGIQTSEDYRFYAISAEFPEFSNKDKTLVFQFSVKHEQKLDCGGGYMKLLSGDVDQKKFGGDTPYSIMFGPDICGYTTKKVHAILTYNDANHLIKKDVPCETDQLTHVYTFILRPDATYTILIDNVEKQTGSLYADWDLLPPKKIKDPNAKKPEDWDEQEYIPDPEDKKPDGYDDIPKEIPDTDAKKPEDWDEEEDGEWTAPTIPNPEYMGEWKPKQIKNPNYKGKWEAPEIDNPDFKDDPELYVFPKLKYVGIELWQVKSGSLFDNVLICDDPDYAKKLAEETWGKLKDAEKAAFDEIEKKKEEEESKDAPAETDGEDEAEEDEGEESDTESKTEAKSEVSEETAEKDATAHDEL

SEQ ID NO: 114 - DNA, 1596 bp, Brassica napus
atgatgagaaaccggcaactattatccggccttttgcttatcttagctttcgtttcgctccagaagctttgctactgtgacgatcagacggtgttgtatgaatcgttcgatgagccattcgaaggtcgctggatcgtttcgaagaatggtgattacgaaggtgtatggaagcatgcaaagagtgagggacatgatgattatggacttctcgtaagcgagaaggcccgtaagtatggtattgtgaaagagcttgacgagcccctaagcctcaaggatggaacagttgttcttcagtacgaggttcgtttccaggaggggcttgagtgtggtggtgcttacttgaaatacctccgtcctcaagaagctggatggactgctgaggggttcaatagtgaatctccttactctatcatgtttgggcctgacaagtgtggagccactaacaaagtgcatttcatcttgaagcacaagaatcccaagagtggcgagtacgtcgagcaccacctcaagttccctccctctgttcctcatgacaagctttcccatgtctacaccgccatcgtgaagcccgacaacgaggttagaattttggttgatggagaggagaagaaaaaggctaatttactctctggagaagactttgagcctgcattgatccctgacaagaccatccctgaccctgaggacaagaaaccagaagactgggatgaaagagccaagattcctgatcctagtgccgtgaagcctgacgactgggacgaggatgcacccatggagatcgcagatgaggaagctgagaaaccagaaggatggttagacgatgagcctgaggaggttgacgacccagaggcgaccaaacctgaagattgggatgatgaggaagatggtatgtgggaggctccaaagattgacaaccccaagtgtgaaacagcaccaggttgtggtgaatggaagagaccgatgaagaagaaccctgcttacaagggcaagtggagtgcacctctcatagataaccctgcttacaagggaatctggaaacccagagacatccctaaccctgactactttgagctagacagacccaattacgaacccattgcagccataggtatagagatctggacaatgcaagacggtatcttgtttgacaacatgttgatagcgaaagacgagaaggtcgccgagacttacagacagaccacttggaagcctaagtttgatgttgagaaagagaaacaaaaggcagaagaggaagctgctggctctgcagatggtctcaagagctaccagaaggttgtgttcgacctcttgaacaaggttgcagacatttctttcctaagtgcgtacaagtctaagatcacggaactgattgagaaagctgaggaacaaccaaacttaaccattggtgtcctcgtctccattgtcgtagtatttttctcgctcttcatcaagcttatcttcggtgggaagaaggcggcagcaactgtggaaaagaagaaaccagaagtaggagagagctcaaaaagtgaagatgaggcagagaagaaggaagaaaccgctgctccacgcaaaaggcaaccgagacgtgataattag

SEQ ID NO: 115 - protein, 531 aa, Brassica napus
MMRNRQLLSGLLLILAFVSLQKLCYCDDQTVLYESFDEPFEGRWIVSKNGDYEGVWKHAKSEGHDDYGLLVSEKARKYGIVKELDEPLSLKDGTVVLQYEVRFQEGLECGGAYLKYLRPQEAGWTAEGFNSESPYSIMFGPDKCGATNKVHFILKHKNPKSGEYVEHHLKFPPSVPHDKLSHVYTAIVKPDNEVRILVDGEEKKKANLLSGEDFEPALIPDKTIPDPEDKKPEDWDERAKIPDPSAVKPDDWDEDAPMEIADEEAEKPEGWLDDEPEEVDDPEATKPEDWDDEEDGMWEAPKIDNPKCETAPGCGEWKRPMKKNPAYKGKWSAPLIDNPAYKGIWKPRDIPNPDYFELDRPNYEPIAAIGIEIWTMQDGILFDNMLIAKDEKVAETYRQTTWKPKFDVEKEKQKAEEEAAGSADGLKSYQKVVFDLLNKVADISFLSAYKSKITELIEKAEEQPNLTIGVLVSIVVVFFSLFIKLIFGGKKAAATVEKKKPEVGESSKSEDEAEKKEETAAPRKRQPRRDN

SEQ ID NO: 116 - DNA, 1608 bp, Brassica napus
atgatgagagaccggcagctattctccggccttatgcttatcctagctctcctctcgctccagaacctttgccactgcgacgataatacggtgttgtatgaatcgttcgatgaggcgtttgatggtcgctggatcgtttcgaagaatggtgattacgaaggtgtgtggaagcatgcgaagagtgagggacatgatgattacggacttctcgtaagcgagaaggctcgtaagtacggtatagtgaaggagcttgacgagcctctaaacctcaaggaaggaaccattgttcttcagtacgaggttcgtttccaggaagggcttgagtgtggtggtgcttacttgaagtacctccgtcctcaggaagctggatggacacctgaagggttcgatagcgaatctccttactctatcatgtttgggcctgacaagtgtggagccacaaacaaagttcatttcatcttgaaacacaagaacccaaagagcggcgagtacgttgagcaccatctcaagttccctccctctgttccttacgacaagctttcccatgtctacaccgctatcttgaagccagacaacgaggttaggattctggttgatggagaggagaagaagaaggctaatttactttctggggaggactttgagcctgcgttgatccctgccaagaccatccctgaccctgaagacaagaaaccagaagactgggatgagagagccaagatccctgatcctaacgccgtgaagcctgaagactgggacgaggaggcgcccatggagatcgaagacgaggaagctgagaaacccgaaggatggttagatgacgagcctgaggaggtggacgacccagaggcgaccaagcctgaagactgggatgatgaggaagatggtatgtgggaggctccaaagattgacaaccccaagtgtgaagcagcaccaggctgtggtgaatggaagagacccatgaagaagaatcctgcttacaagggcaaatggagtgcgcctatgatagacaaccctgcttacaagggaatctggaagcccagagacatccctaaccctgactactttgagctggacagacctgacttcgaacccattgcggcaatcggtattgagatctggacgatgcaagacggtatcttgtttgataacatgttgatagcgaaagacgagaaggtcgctgagagttacagacagacgacatggaagccgaagttcgatgttgagaaagagaaacaaaaggcggaagaggaggctgctagctctgctgatggtctcaagagctaccagaaggttgtgttcgacctcttgaacaaggttgcagacatttctttcctaagtgcctacaagtctaagatcacagaactgattgagaaagctgaggaacaaccaaacttaaccattggtgtcctagtctccattgtcgtagtattcttctcgctcttcatcaagcttatcttcggtggcaaaaaggcggcgccggcagcaaccgtggagaagaagaagaaaccagaagtaggagagagctcaaagagtgaagatgagacagagaagaaggaagaaaccgctgctgctcctcgcaaaaggcaaccgaggcgtgacaattag

SEQ ID NO: 117 - protein, 535 aa, Brassica napus
MMRDRQLFSGLMLILALLSLQNLCHCDDNTVLYESFDEAFDGRWIVSKNGDYEGVWKHAKSEGHDDYGLLVSEKARKYGIVKELDEPLNLKEGTIVLQYEVRFQEGLECGGAYLKYLRPQEAGWTPEGFDSESPYSIMFGPDKCGATNKVHFILKHKNPKSGEYVEHHLKFPPSVPYDKLSHVYTAILKPDNEVRILVDGEEKKKANLLSGEDFEPALIPAKTIPDPEDKKPEDWDERAKIPDPNAVKPEDWDEEAPMEIEDEEAEKPEGWLDDEPEEVDDPEATKPEDWDDEEDGMWEAPKIDNPKCEAAPGCGEWKRPMKKNPAYKGKWSAPMIDNPAYKGIWKPRDIPNPDYFELDRPDFEPIAAIGIEIWTMQDGILFDNMLIAKDEKVAESYRQTTWKPKFDVEKEKQKAEEEAASSADGLKSYQKVVFDLLNKVADISFLSAYKSKITELIEKAEEQPNLTIGVLVSIVVVFFSLFIKLIFGGKKAAPAATVEKKKKPEVGESSKSEDETEKKEETAAAPRKRQPRRDN

SEQ ID NO: 118 - DNA, 1251 bp, Beta vulgaris
atggagaatcgggggcgaaaccctagctttctctctctcctccttcttctctctcttttcgccatcgcatctgctaaagtcttcttcgaggaacgtttcgaagatggatgggagaagcgttgggtcaaatctgaatggaagaaggatgaaagtatggctggagagtggaattacacatccggcaaatggaacggagatgccaatgacaaaggtatccagactagcgaggactacagattctatgctatctctgctgaattcccagaattcagcaacaaagataataccttggttttccagttttctgttaagcatgaacagaagcttgattgtggaggtggttacatgaagttactcagtggtgaagttgaccagaagaaatttggtggggataccccatacagcattatgtttggccctgatatctgtgggtacagtactaagaaagtccatgccattttcaactacaatgatacaaatcacttgatcaagaaggatgtcccttgtgagactgaccaattgactcatgtgtacaccttcattctccgcccagatgctacctacagcatcctcatcgacaaccaggagaaacaaactggtagtctttacactgactgggacctacttcctgctaagaaaatcaaggatcctgaggctaagaagcccgaggattgggatgacaaggagttcattcctgaccccgaagacaagaagccagagggttatgacgacatcccagcagagattactgaccctgaggctaagaagccggaggactgggatgatgaggaagatggtgaatggactgccccaaccattccaaaccccgagtacaagggcccatggaaagcaaagaaaatcaagaaccccaactacaagggcaagtggaaggcacccatgatcgacaacccagaattcaaggatgacccagaactgtatgtttaccccaagctcagatatgttggcgttgagttgtggcaggtgaagtctggcacactctttgacaacgtcttggtctgtgatgaccctgagtatgcaaagcagttggctgaggaaacctggggaaagcaaaaggatgctgaaaaggctgcttttgaggagcttgagaagaagagagaagaggaggaaaccaaggatgatcccgttgaatcagatgctgaggatgaagatgaagctgaagccgacgactctgataaggatgatgctgataaatccgatgacaaggatgacgatcaacatgatgaactgtga

SEQ ID NO: 119 - protein, 416 aa, Beta vulgaris
MENRGRNPSFLSLLLLLSLFAIASAKVFFEERFEDGWEKRWVKSEWKKDESMAGEWNYTSGKWNGDANDKGIQTSEDYRFYAISAEFPEFSNKDNTLVFQFSVKHEQKLDCGGGYMKLLSGEVDQKKFGGDTPYSIMFGPDICGYSTKKVHAIFNYNDTNHLIKKDVPCETDQLTHVYTFILRPDATYSILIDNQEKQTGSLYTDWDLLPAKKIKDPEAKKPEDWDDKEFIPDPEDKKPEGYDDIPAEITDPEAKKPEDWDDEEDGEWTAPTIPNPEYKGPWKAKKIKNPNYKGKWKAPMIDNPEFKDDPELYVYPKLRYVGVELWQVKSGTLFDNVLVCDDPEYAKQLAEETWGKQKDAEKAAFEELEKKREEEETKDDPVESDAEDEDEAEADDSDKDDADKSDDKDDDQHDEL

SEQ ID NO: 120 - DNA, 1260 bp, Capsicum annuum
atggctactcaacgaagaaaaagccctagctctctctatctcattgctgttttctctctacttgtagcttccgccgccgccaaagttttcttcgaggaaaatttcaatgatggctgggagagcagatgggtgaaatctgattggaagaaagacgagaacatggccggagagtggaatcacacctctggcaagtggagtggagacgctaatgacaaaggtatccagaccagtgaagactacaggttctatgccatttcggctgagttccctgaatttagtaacaagggaaagaacctagtgttccagttctctgttaagcatgagcaaaagcttgactgtggtggtgggtacatgaagttgattagtggggatgttgaccaaaagaaattcggtggtgatactccctacagtatcatgtttggaccagatatctgtggctacagcaccaagaaggtccacgctattctcacttataacgacacaaaccacctgatcaagaaggaagtcccatgtgagactgatcaactgacccatgtctacactttcatcctccgccctgatgccacatacagcattctcattgacagtgtggagaaacagtctggtagcttgtactctgactgggacattctcccaccaaagacgatcaaggatccaagtgccaagaaacctgaagattgggatgacaaggaattcattgatgatcctgaggataagaagccagagggctatgatgacattccagaagagataactgatcctgatgccaagaagccagaggactgggatgatgaagaagatggtgaatggacagccccaaccattcctaacccggagtacaagggcccatggaaggcaaagaaaattaagaaccccaactacaaggggaagtggaaggctcctatgattgataacccagagttcaaggatgacccagatctctatgttttcccaaaattgaagtatgtgggagttgaattgtggcaagtgaaatctggaaccttgtttgacaatgttgtcataaccgatgatccagagtatgccaagtcagttgctgaggaaacatggggaaagcagaaggatgcggaaaaggctgcttttgaagaagcagaaaagaagagagaggaggaggaatcaaaggctgctccagctgattctgacgccgaggatgatgatgaggctgattcagatgatgctgatgatgctgatgacaagtctgagtccaaggatgatgatgaagcagcacatgatgaactgtaa

SEQ ID NO: 121 - protein, 419 aa, Capsicum annuum
MATQRRKSPSSLYLIAVFSLLVASAAAKVFFEENFNDGWESRWVKSDWKKDENMAGEWNHTSGKWSGDANDKGIQTSEDYRFYAISAEFPEFSNKGKNLVFQFSVKHEQKLDCGGGYMKLISGDVDQKKFGGDTPYSIMFGPDICGYSTKKVHAILTYNDTNHLIKKEVPCETDQLTHVYTFILRPDATYSILIDSVEKQSGSLYSDWDILPPKTIKDPSAKKPEDWDDKEFIDDPEDKKPEGYDDIPEEITDPDAKKPEDWDDEEDGEWTAPTIPNPEYKGPWKAKKIKNPNYKGKWKAPMIDNPEFKDDPDLYVFPKLKYVGVELWQVKSGTLFDNVVITDDPEYAKSVAEETWGKQKDAEKAAFEEAEKKREEEESKAAPADSDAEDDDEADSDDADDADDKSESKDDDEAAHDEL

SEQ ID NO: 122 - DNA, 1626 bp, Centaurea maculosa
atggaacaaagcaaaaggaggatgtctaccttgcagttttgttgttttctcttgatcggttgcttgatttcgcagatttatgcatcttctgacgctgtgttttacgagtcgtttgatgagtcgtttgaagggagttggatcgcatctgagaaggaggagtattctggtgtatggaagcactcaaagagcgaaggacatgatgactacggacttctcgtgagcgagaaggccagaaagtatgccatcgttaaggagctagagaaacccgttgagctcaaggatggtacaatcgttctacaattcgaagtccgccttcaaaacggtcttgaatgtggtggtgcatatttgaaatatctccgtccacaggaggctggctggaccgccaagggatttgacaacgagtctccttactccatcatgtttggccctgacaaatgtggtgccacaaacaaagtccacttcatcttaaaacacaagaaccccaagagcggagaattcgttgaacaccatctcaaattccccccttccgtcccttcagacaaattgacccatgtgtacaccgccatcttgaaacccgacaatgaggtcatcatcctggttgacggtgaagagaaaaagaaggctaacttcctatcgtccgaagacttcgaacccgcactaatcccgtcaaaaaccatccctgaccctgatgacaaaaagcccgaagactgggacgagagggccaagatccccgacccagaggcaaccaaacccgacgattgggatgaggatgcaccaatggaaattctcgatgaggaagctgagaagcccgaaggatggctagaagatgagcctgaagaaatcgatgatcccgaggctgtgaagcccgaggattgggatgatgaggaggacggtgagtgggaggctcccaagatcgacaaccctaaatgtgaagctgcatccggatgcggagaatggagaagaccgttgaaaaggaacccagcttacaagggcaaatggcatgctcctcttatcgacaaccctgcttacaagggtatctggaagcctcaagaaattccaaaccctaactactttgaacttgaaacccctaactttgagccaattgccgctatcggtattgagatctggaccatgcaagatggcatcttgttcgataacatcttgatcgcgagtgacgagaagactgcagagacgatcagggaaaccacatggaagcccaagtttaaggtggaggaagagaaacagaaggctgaagaaccagctggtttcgacggtctcaagggtattcagaaaactgtgtttgatgttctttacaaggttgctgatctgcctttcttgggcgaccacaagatcaaggttttggaattgattgagaaagccgaaaaacaaccaaacattacaatcggtgtcataatttccatcatcgttgtgatcttgagtgtcttgttcaagctgttgtttggtggaaagaaaacggcaaaggtgaataacaatgtagcagcagcagcagcaaagaaggaagaaggtgaggaggcttcaagcaccccagcagaagataaagaggaagagaagaaagacgaagatgcagctgctcctcgtaggaggaccacaaggcgcgacaactag

SEQ ID NO: 123 - protein, 541 aa, Centaurea maculosa
MEQSKRRMSTLQFCCFLLIGCLISQIYASSDAVFYESFDESFEGSWIASEKEEYSGVWKHSKSEGHDDYGLLVSEKARKYAIVKELEKPVELKDGTIVLQFEVRLQNGLECGGAYLKYLRPQEAGWTAKGFDNESPYSIMFGPDKCGATNKVHFILKHKNPKSGEFVEHHLKFPPSVPSDKLTHVYTAILKPDNEVIILVDGEEKKKANFLSSEDFEPALIPSKTIPDPDDKKPEDWDERAKIPDPEATKPDDWDEDAPMEILDEEAEKPEGWLEDEPEEIDDPEAVKPEDWDDEEDGEWEAPKIDNPKCEAASGCGEWRRPLKRNPAYKGKWHAPLIDNPAYKGIWKPQEIPNPNYFELETPNFEPIAAIGIEIWTMQDGILFDNILIASDEKTAETIRETTWKPKFKVEEEKQKAEEPAGFDGLKGIQKTVFDVLYKVADLPFLGDHKIKVLELIEKAEKQPNITIGVIISIIVVILSVLFKLLFGGKKTAKVNNNVAAAAAKKEEGEEASSTPAEDKEEEKKDEDAAAPRRRTTRRDN

SEQ ID NO: 124 - DNA, 1299 bp, Centaurea maculosa
atgagcaaccatggagttggaaggtcttcatctctatctctcatctttggagcacttctatttgttctactctccatctgtgatttctcctactcagagatcatcttcgaggagcgatttgaagatgggtggcagagccggtgggtgaagtctgattggaaaagaagtgaagggaaggcgggtaattttaagcacacagccgggtcatggtctggtgatccagatgataaaggtattcagacaacgactgatgccagacattttgccatatctgcaaagattccagaattcaacaacaaaaatagaacattggtgttacagtactcgatcaaaatcgaacaggatatcgaatgtggtggtggttatatcaagcttatgtctggatatgtcaaccaaaagaaatttggtggtgacactccatatagtgtgatgtttggaccagatctatgtggcacacagacaaagaagcttcatgttatcctttcgtaccaggggcaaaattatccgatcaagaaggatctacagtgtgaaacagacaagttaacccatttctacacgttcatccttcggcctgatgcaagttatagcattctaatagatggcagggaaagagattccggaagtatgtatacagactgggatatccttccaccccgtaaaatcaaagacgtgaaggccaaaaagcctgctgattgggaggaaagagaatatattgaagatccagatcaagttaagcctgagggctatgattcaatcccgagagaaattcctgacccgaaagctaaacagcctgatacctgggatgaagatgaggatgggatatggagaccaccaaagataccaaatccggcatacaaagggccatggaagccaaagaaaataaaaaatccaaactacaaggggaaatggaagatcccttggatcgataacccagaatttgaagatgatcctgatctatatgtgctcaagccaattaaatatgtgggaatagaggtttggcaggtaaaagctggatctgtatacgacaacattctcatttgtgacgatcccgagtatgcaaaagatgtgatacaagaagttttcaccaatagagagattgaaaaagaagcattagaggaagcagagaaagcaaaaaaagcaagggaggaagaggaagcacaaagggcaagagaggaaggtgaaaggaggaagagagaacggggttatgatagaaggcaccgagataaggagcgctacaaggatagatacagaaagtacaatcgccgtgattaccttgacgattatcatgatgagctttga

SEQ ID NO: 125 - protein, 432 aa, Centaurea maculosa
MSNHGVGRSSSLSLIFGALLFVLLSICDFSYSEIIFEERFEDGWQSRWVKSDWKRSEGKAGNFKHTAGSWSGDPDDKGIQTTTDARHFAISAKIPEFNNKNRTLVLQYSIKIEQDIECGGGYIKLMSGYVNQKKFGGDTPYSVMFGPDLCGTQTKKLHVILSYQGQNYPIKKDLQCETDKLTHFYTFILRPDASYSILIDGRERDSGSMYTDWDILPPRKIKDVKAKKPADWEEREYIEDPDQVKPEGYDSIPREIPDPKAKQPDTWDEDEDGIWRPPKIPNPAYKGPWKPKKIKNPNYKGKWKIPWIDNPEFEDDPDLYVLKPIKYVGIEVWQVKAGSVYDNILICDDPEYAKDVIQEVFTNREIEKEALEEAEKAKKAREEEEAQRAREEGERRKRERGYDRRHRDKERYKDRYRKYNRRDYLDDYHDEL

SEQ ID NO: 126 - DNA, 1263 bp, Chlamydomonas reinhardtii
atgaagtggggtgtggttgcggtgctggccaccctggtggtggccgcgtccgccaaggactacttcaaggagaccttcgatggctcctgggccgaccgctggaccaagtcctcttggaaggtttctgatgggtccgctggcgagttcaagctgaccgctggcaagtggtatggcgacgctgaggccgacaagggtatccagaccggccccgactccaagttcttcgctatttccgcgcccctggccaccgtgttcgacaacaccggcaaggacaccgttgtccagttctccgtcaagcatgagcaggacctggactgcggtggtggctacatcaaggtggtgcccgctaccagcgagaagcagatgggcgagttcggtggcgacaccccctactccatcatgttcggccccgacatctgcggctactcgacccgcaaggtgcacgtcatcctgacctacaagggcaagaactacctgattaagaaggacatcaaggcggagactgaccagctgacccatgtgtacaccctggtcatcaagcccgacaacacctaccaggttctgattgacctgaaggaggtcgcctcgggctccctgtacgaggactgggacatgctgccccccaagaccatcaaggaccccaaggcctccaagcctgaggactgggacgagcgtgaggagatcgccgaccccgaggacaagaagcctgagggctgggacgacatccccgccaccattgccgacaaggacgccaagaagcccgaggactgggacgacgaggaggacggcacctgggagccgcccatgatccccaaccccgagtacaagggtgagtggaaggccaagatgatcaagaaccccgcctacaagggcatctgggtcgcccccgacattgacaaccctgactacgtccacgacgacaagctgtacaacttcaaggacctgaagtttgtgggcttcgagctgtggcaggtcaagtcgggctccatcttcgacaacatcctggtgactgacgacctggaggccgccaagaagttcgctgaggacacctggggcaagcacaaggacgaggagaaggccatgtttgacaaggtcaagaaggaggaggacgagaagaaggccaaggacgccccccctccccccgtcgacgctgaggccgccgaggaggaggacgacgagtacgaggacaaggaggagccctccggcatgggctccatcaagatccccaaggaggaggaggagtccggtcacgacgagctgtaa

SEQ ID NO: 127 - protein, 420 aa, Chlamydomonas reinhardtii
MKWGVVAVLATLVVAASAKDYFKETFDGSWADRWTKSSWKVSDGSAGEFKLTAGKWYGDAEADKGIQTGPDSKFFAISAPLATVFDNTGKDTVVQFSVKHEQDLDCGGGYIKVVPATSEKQMGEFGGDTPYSIMFGPDICGYSTRKVHVILTYKGKNYLIKKDIKAETDQLTHVYTLVIKPDNTYQVLIDLKEVASGSLYEDWDMLPPKTIKDPKASKPEDWDEREEIADPEDKKPEGWDDIPATIADKDAKKPEDWDDEEDGTWEPPMIPNPEYKGEWKAKMIKNPAYKGIWVAPDIDNPDYVHDDKLYNFKDLKFVGFELWQVKSGSIFDNILVTDDLEAAKKFAEDTWGKHKDEEKAMFDKVKKEEDEKKAKDAPPPPVDAEAAEEEDDEYEDKEEPSGMGSIKIPKEEEESGHDEL

SEQ ID NO: 128 - DNA, 1227 bp, Centaurea solstitialis
atggcgaaactgaggctaaaccctagctctctcggccttctctctcttctgctactcctctccgtcgcttctgctaaggtgttcttcgaggaacgcttcgaagatggatgggaaagccggtgggttaaatctgattggaagaaagaggagaacacggctggggagtggaattacacatctggtcaatggactggagatgccaacgataaaggaattcagaccagtgaagactacaggttttacgccatatcagcagagtaccctgagtttagcaacaaggataagactctagttttccaattttctgttaagcatgagcagaagcttgattgtggtggtggatacatgaaattgctcagtggtgatgtggatcaaaagaaatttggtggtgatacaccatacagcatcatgtttggacctgatatctgtgggtatgccacaaagaaggttcatgcaattcttacatacaatggggaaaacaaattgatcaagaaagatgtcccttgtgagactgaccagcttacacatgtttataccttcatcctccgccctgatgccacctacagtatcctcattgataatgtggagaagcaaacaggaagcttgtactctgattgggatcttctcccagcaaagcagataaaggacccagaggcaaaaaagcctgaagattgggatgagaaggagttcattgctgaccctgaagacaagaaaccagagggttacgatgacatcccagaggagattgcagacccagatgccaaaaagccagaagactgggatgaggaggaagatggtgagtggacagtcccaactattcccaaccctgagtacaagggtccatggaaggcaaagaaaatcaagaaccccaactacaaagggaagtggaaggcacctttgattgacaacccagattttaaggatgaccctgatctctacgttttccccaagttgaagtatgttggcatagagctgtggcaggttaaatctggaactttgtttgacaatgtcttgatatgcgatgatcctgaatatgccaaacaagtggcagaagaaacatggggcaaacaaaaagatgctgagaaggcagcatttgaagagctagaaaagaaaaaggaggaggaggaatcaaaggatgatccagctgattctgatgccgaaaatgatgatgctgaaccggaggatgatgacgaagccgaagaaagcgatgtgaaggatgagctatag

SEQ ID NO: 129 - protein, 408 aa, Centaurea solstitialis
MAKLRLNPSSLGLLSLLLLLSVASAKVFFEERFEDGWESRWVKSDWKKEENTAGEWNYTSGQWTGDANDKGIQTSEDYRFYAISAEYPEFSNKDKTLVFQFSVKHEQKLDCGGGYMKLLSGDVDQKKFGGDTPYSIMFGPDICGYATKKVHAILTYNGENKLIKKDVPCETDQLTHVYTFILRPDATYSILIDNVEKQTGSLYSDWDLLPAKQIKDPEAKKPEDWDEKEFIADPEDKKPEGYDDIPEEIADPDAKKPEDWDEEEDGEWTVPTIPNPEYKGPWKAKKIKNPNYKGKWKAPLIDNPDFKDDPDLYVFPKLKYVGIELWQVKSGTLFDNVLICDDPEYAKQVAEETWGKQKDAEKAAFEELEKKKEEEESKDDPADSDAENDDAEPEDDDEAEESDVKDEL

SEQ ID NO: 130 - DNA, 1626 bp, Carthamus tinctorius
atggaagaaagcaaaaggaggatgtctgctttgcagttttgttgctttctcttgatcggttgcttgatttcgcagatttatgcatcttctgacgctgtgttctacgagtcgtttgatgagtcgtttgaagggagttggatcgcgtctgagaaggaggagtattctggtgtatggaaacactcaaagagcgaaggacatgatgactacggacttctcgtgagcgagaaggccagaaagtatgccatcgttaaggagctagagaaacccgttgagctcaaggatggtacaattgttctccaattcgaagtccgccttcaaaatggtcttgaatgtggtggtgcatatttgaaatatctccgcccacaggaggctgggtggactgcgaagggattcgacaacgagtcaccttactccatcatgtttggccctgacaaatgtggtgccacaaataaggtccacttcatcttaaaacacaagaaccccaagagcggagaattcgttgaacaccatctcaaattccccccttccgtcccttcagacaaattaacccatgtatacactgccattttgaaacccgacaatgaggtcatcatcctggttgatggagaagagaaaaagaaggctaatttcctatcctctgaagactttgaacccgcactaatcccatcaaaaaccattcccgaccccgatgacaaaaagcctgaagactgggatgagcgtgccaagatccccgacccggaggcaaccaaacccgacgattgggacgaggacgcaccaatggaaattctcgacgaggaagctgaaaagcctgaaggatggctggaagatgagcctgaagaaatcgacgaccccgaggccgtgaagccagaggattgggacgatgaggaggatggtgagtgggaggctcccaagattgacaacccgaaatgtgaagctgcatccggatgtggagaatggagaagaccgttaaaaaggaacccggcttataagggcaaatggcatgctcctcttatcgacaaccctgcttacaagggtatctggaagcctcaagaaattccaaaccccaactactttgaacttgaaacccctaacttcgagccgattgccgctattggtatcgagatctggaccatgcaagacggcatcttgttcgacaacatcttgatagcgagtgacgagaagactgcagagacgatcagggaaaccacatggaagccgaagtttaaggtggaagaagagaaacagaaggctgaagaaccagctggtttcgatggtctcaagggtattcagaaaactgtgtttgaccttctttacaaggttgctgatctgcctttcttgggtgaccacaagatcaaggttttggaactgattgagaaggccgaaaaacaaccgaacattacaattggtgtcataatttctatcatcgttgtgatcttgagcgtcttgttcaagttgttgtttggtggaaagaaaacggcaaaggtgaataacaatgtagcagcagcagcagcaaagaaggaagaaggtgaggaggcctcaagcaaccaggcggaagagaaagaggaagagaagacagatgaagatgcagctgctcctcgtagaaggaccacaaggcgtgacaactaa

SEQ ID NO: 131 - protein, 541 aa, Carthamus tinctorius
MEESKRRMSALQFCCFLLIGCLISQIYASSDAVFYESFDESFEGSWIASEKEEYSGVWKHSKSEGHDDYGLLVSEKARKYAIVKELEKPVELKDGTIVLQFEVRLQNGLECGGAYLKYLRPQEAGWTAKGFDNESPYSIMFGPDKCGATNKVHFILKHKNPKSGEFVEHHLKFPPSVPSDKLTHVYTAILKPDNEVIILVDGEEKKKANFLSSEDFEPALIPSKTIPDPDDKKPEDWDERAKIPDPEATKPDDWDEDAPMEILDEEAEKPEGWLEDEPEEIDDPEAVKPEDWDDEEDGEWEAPKIDNPKCEAASGCGEWRRPLKRNPAYKGKWHAPLIDNPAYKGIWKPQEIPNPNYFELETPNFEPIAAIGIEIWTMQDGILFDNILIASDEKTAETIRETTWKPKFKVEEEKQKAEEPAGFDGLKGIQKTVFDLLYKVADLPFLGDHKIKVLELIEKAEKQPNITIGVIISIIVVILSVLFKLLFGGKKTAKVNNNVAAAAAKKEEGEEASSNQAEEKEEEKTDEDAAAPRRRTTRRDN

SEQ ID NO: 132 - DNA, 1308 bp, Chlorella vulgaris
atggtagccggtcgggcaggcgctctcctgatcgtggccctagtgggggctgctgcttgcgtcgcatcagcagagttctttgaggactttagttctggctgggagaatcggtgggcgtactccgcagatgacaagtactccggcagattcgtagctgacacgcctgagggctggcccgacgcaggcctcaaggttccggagaaggcgaagcactacggtttgaccgcgaaattggatactccagtggatcccgcgaagggtctggtcctccagtacgagctgaagcttactgatggcctgacctgtggtggtgcctatctgaagttcttgaccgagacagcggacttcgacccagctgagctcacagatggcacgccatacactgtcatgtttggacctgacaagtgtggcggcaccaacaaggtgcaccttattcttaagcacaagtcccccaagacgggcgagattgaggagaagcacctgaagagccctcccatggtggagtccgacaagggcactcacgtgtacaccgtggtcatcaagcctgacaacacctacgctctgctcattgacggcgaggagaagaaggctggcagcatccttgaggactttgaccccgccgtcaacccccctgaggagatcgatgaccctgaggactccaagcctgatgactgggtggaccttcccaagattgctgaccctgaggccaccaagccggacgactgggatgaggacgcccctcgcatgatcgaggacgatgaggccgagaagccggagggctggctcgatgacgaggcagcagagattgatgacccaggcacgcccgaaccccttattctccattatttacccgaggactgggatgatgaggaggatggcgagtgggaggcgcctaagatcaccaaccccaagtgcaaggagggccccggctgcggcgagtggaagcgcccccagaagtccaaccccgactacaagggcaagtgggccgcacccctcattgacaaccccgagtacaagggtgtgtggaagccgcggaagatcgccaacccggactacttcctggacgagtcccccctggccaacatcggcaaggtgggcggagtggccattgagatctggaccatggacgagggctacctcttcgacaacgtcctcatcgccaacgacgccgctgctgctaccgccaagcgcgacaccctctgggcgcccaagaaggaggccgaggtgggctgcgcacctgtgcttctagcactgcccacttcccttactgcatgcctttgctgtgcatgcccccttctgcccgcctag

SEQ ID NO: 133 - protein, 435 aa, Chlorella vulgaris
MVAGRAGALLIVALVGAAACVASAEFFEDFSSGWENRWAYSADDKYSGRFVADTPEGWPDAGLKVPEKAKHYGLTAKLDTPVDPAKGLVLQYELKLTDGLTCGGAYLKFLTETADFDPAELTDGTPYTVMFGPDKCGGTNKVHLILKHKSPKTGEIEEKHLKSPPMVESDKGTHVYTVVIKPDNTYALLIDGEEKKAGSILEDFDPAVNPPEEIDDPEDSKPDDWVDLPKIADPEATKPDDWDEDAPRMIEDDEAEKPEGWLDDEAAEIDDPGTPEPLILHYLPEDWDDEEDGEWEAPKITNPKCKEGPGCGEWKRPQKSNPDYKGKWAAPLIDNPEYKGVWKPRKIANPDYFLDESPLANIGKVGGVAIEIWTMDEGYLFDNVLIANDAAAATAKRDTLWAPKKEAEVGCAPVLLALPTSLTACLCCACPLLPA

SEQ ID NO: 134 - DNA, 1085 bp, Euphorbia esula
atgggagaagcaaagcgcatctctctcggattggctactgtgcttttagtagctttcatttcctttaatcagctctgcgcctctgatgatgatgcgatcttgaacgagacctttgacgagtcttttgaagggcgatggattgtttctgaaaatgatgattataaaggtgtctggaagcactcaaagagtgagggccatgacgattatggtcttctagtggctgaaaaggctaggaagtatgccattgtaaaagagcttgaaaaacctgcaagtctcaaggatggaaccattgtccttcaattcgagactcgctttcaaaatgggctcgaatgtggtggtgcatatttgaaatatctgcgcccacaggaagctggatgggcagccaagtcatttgacaacgaagctccatattcaattatgtttggtcctgacaaatgtggggccacaaacaaggttcacttcatcctaaagcacaagaacccaaagagtggagagtatgttgaacatcatctcaagttccctccatctgttccatcagacaaacttactcatgtatacactgccattctgagacctgacaatgaactccaaattttagttgatggagaggagaaaaagaaggcaaatttcctctcatcggatgattttgaacctgctctcattcctccccagacaattcctgatcccgatgatacgaaacctgaggactgggacgagagagccaagattcctgaccctaatgcagttaagcctgatgactgggatgaggaagcaccaatggagattgtagatgaggaagctgagaaacctgaaggatggttagatgatgaacctgaggaaattgatgaccctgaagccacataacctgaagactgggatgatgaggaagatggtgaatgggatgcaccaaaggttgataaccccaaatgtgaggttgcacctggttgtggagaatggaagaggcccatgaaaagaaacccagcctacaaaggaaaatggcacgcaccttctatcgataaccccaattacaagggtatctggaagcctcagcagattcccaaccccagctactttgagctccacag

SEQ ID NO: 135 - protein, 361 aa, Euphorbia esula
  misc_feature (361)..(361): Xaa can be any naturally occurring amino acid
MGEAKRISLGLATVLLVAFISFNQLCASDDDAILNETFDESFEGRWIVSENDDYKGVWKHSKSEGHDDYGLLVAEKARKYAIVKELEKPASLKDGTIVLQFETRFQNGLECGGAYLKYLRPQEAGWAAKSFDNEAPYSIMFGPDKCGATNKVHFILKHKNPKSGEYVEHHLKFPPSVPSDKLTHVYTAILRPDNELQILVDGEEKKKANFLSSDDFEPALIPPQTIPDPDDTKPEDWDERAKIPDPNAVKPDDWDEEAPMEIVDEEAEKPEGWLDDEPEEIDDPEATPEDWDDEEDGEWDAPKVDNPKCEVAPGCGEWKRPMKRNPAYKGKWHAPSIDNPNYKGIWKPQQIPNPSYFELHX

SEQ ID NO: 136 - DNA, 1632 bp, Fragaria vesca
atggctgggattcgctccggcgtcgtttcggtgctcttcgtgctctttgcctgcttcgctttccagcacctttctgcttccgacgatacggtgttttacgattcgttcgacgaatcatttgaggggcgatggaccgtgtctggcaaagacgaatatcaaggtgtttggaagcactcaaagagtgagggccatgaggattttgggcttcttgtgagtgagaaggccaagaagtatgcaatagttacggaggttgatgagcctgtgagcctcaaggatgggactgttgtcctccaatttgagactcgtctccagaatgggcttgaatgtggtggtgcctatctgaagtaccttcgaccccaggaggctggatgggaacctaagatattcgacaatgagtctccgtattctatcatgtttggacctgacaagtgtgggcttacaaacaaggttcacttcatctttaagcataagaatcccaagagtggagagtatgttgaacaccatcttaccaccccaccctctgttccagctgacaaactttctcatgtgtacactgccatcatcaaacctgataacgagttgataattctggtcgacggggaggagaagaagaaggccaacttcttatcagctgatgattttatgcctccacttatccctaccaagacaattcctgatccagaagataagaagcctgaggattgggatgagagagccaaaattccggatcctaatgcagttaaacctgatgattgggatgaggatgcacccatggaaattgaagatgaggaagcagagaaacctgaaagatggttggatgatgaacctgaggaggtagaggatcctgaagccacaaagccagaggattgggatgacgaggaggatggtgagtgggaggccccaaagattgacaatcccaagtgtgtgactgcccctggttgtggtgaatggaagaggccaatgaagaggaatccagcttacaagggaaaatggcacgcaccactcatcgataaccccagttacaagggtatctggaagcctcaggagattccaaaccctagttactttgagctcgagaaacccaactttgagcccattgccgccatcggaattgagatctggaccatgcaagatggtatattgtttgacaacattttgattactaaagatgagaaagttgccagttcatacagagataccctgtggaagccaaaatatgaagttgagaaggagaaagagaaggctgaggaagatgttcctagttcagaaggtctattagccactgtccagaagaagatatttgacattctatacaaggttgcagatgttcccttcttagctgcttacaagactaagatagttgatctcattgagaaggcagaggaacaacccaatatcacgcttggtgtgatcggctccattggtgtgatcatcttaacagcacttttcatgatcctttttggtggaaagaaacccgccaaggttgagaagaaacccgctgttgccgctgaggcttctggaagtggtgcagagaagaaagaagagagtgagaaggaaggttcttctggtgagaacgagaaggagaccggtgctgctcctcgtcggaggacaggacccagacgtgaaaactga

SEQ ID NO: 137 - protein, 543 aa, Fragaria vesca
MAGIRSGVVSVLFVLFACFAFQHLSASDDTVFYDSFDESFEGRWTVSGKDEYQGVWKHSKSEGHEDFGLLVSEKAKKYAIVTEVDEPVSLKDGTVVLQFETRLQNGLECGGAYLKYLRPQEAGWEPKIFDNESPYSIMFGPDKCGLTNKVHFIFKHKNPKSGEYVEHHLTTPPSVPADKLSHVYTAIIKPDNELIILVDGEEKKKANFLSADDFMPPLIPTKTIPDPEDKKPEDWDERAKIPDPNAVKPDDWDEDAPMEIEDEEAEKPERWLDDEPEEVEDPEATKPEDWDDEEDGEWEAPKIDNPKCVTAPGCGEWKRPMKRNPAYKGKWHAPLIDNPSYKGIWKPQEIPNPSYFELEKPNFEPIAAIGIEIWTMQDGILFDNILITKDEKVASSYRDTLWKPKYEVEKEKEKAEEDVPSSEGLLATVQKKIFDILYKVADVPFLAAYKTKIVDLIEKAEEQPNITLGVIGSIGVIILTALFMILFGGKKPAKVEKKPAVAAEASGSGAEKKEESEKEGSSGENEKETGAAPRRRTGPRREN

SEQ ID NO: 138 - DNA, 1494 bp, Gossypium hirsutum
atggggcgttttgctcttctcctcttactagctttcgcttcatttcaagccctttgcttcgccgctgatgatgatacggccttttatgactcatttgatgagccatttgatggacgatggatcgtgtccgataaagatgattacaaaggtgtatggaaacattcaaagagcgaaggacatgatgactacgggcttcttgtgagcgagaaggcacggaagtatgcgatagtgaatgagctcaatgagcctgtgagtctcaaggatggaagcactgtgcttcagtttgagactcgctttcagaatgggcttgaatgtggtggtgcatatttgaaataccttcgtcctcaagaggctggatggaaggctaagctatttgacaatgaatccccttactctatcatgtttggacctgacaaatgtggagccacaaacaaggttcacttcatcttgaagcataagaatcctaaaagtggggaatacgtcgaacatcatcttaaatacccaccctctgtcccatctgacaagcttactcatgtgtacactgcgatcttgaagcctgacaacgaggttagaattctgattgatggagaagagaaaaagaaggctaacttcctctcagctgatgattttgagccaccacttatccctgctaagacgattcctgatccagacgataagaaacctgaggactgggatgagagagccaaaattcccgacccaaatgctgtaaagccggatgattgggatgaggatgctcccatggaaattgaagatgaggaggctgtgaaaccagaaggatggttagatgatgagcctgaggagatagatgatcctgaggcaaccaagccagaagattgggatgatgaagaggacggtgagtgggaagcccccaaaattgataacccgaagtgtgagacagcccctggttgtggtgaatggaagaggccaatgaagatgaatccagcttacaagggaaaatggtctgctccactaattgataaccccaattacaagggtatttggaagcctcaagagattccaaaccccgactacgttgagcttgataagcctgactttgagcctattgctgctgttggtattgagatttggacaatgcaagatggcatattgtttgacaatattttgattgccaaaaatgacaaggttgctgagtcatatagggagaccacatggaagcctaagtttgaggttgagaaagaaaaacagaaggctgaggatgagtccactgattcagatggactttcaggcgtccagaagaaggtctttgatgtcctttacaaggttgctgatattcctttcttaagtgaatacaagcttcaaatccttgatctcattgagaaggctgagaaacagccaaacatcaccattggtgtcatcgtctccattttggtgattatcctcacagttctcttcagacttcttttcggtgggcaagaagcaaccaaaagtagagaaaaatccggaggttgctga

SEQ ID NO: 139 - protein, 497 aa, Gossypium hirsutum
MGRFALLLLLAFASFQALCFAADDDTAFYDSFDEPFDGRWIVSDKDDYKGVWKHSKSEGHDDYGLLVSEKARKYAIVNELNEPVSLKDGSTVLQFETRFQNGLECGGAYLKYLRPQEAGWKAKLFDNESPYSIMFGPDKCGATNKVHFILKHKNPKSGEYVEHHLKYPPSVPSDKLTHVYTAILKPDNEVRILIDGEEKKKANFLSADDFEPPLIPAKTIPDPDDKKPEDWDERAKIPDPNAVKPDDWDEDAPMEIEDEEAVKPEGWLDDEPEEIDDPEATKPEDWDDEEDGEWEAPKIDNPKCETAPGCGEWKRPMKMNPAYKGKWSAPLIDNPNYKGIWKPQEIPNPDYVELDKPDFEPIAAVGIEIWTMQDGILFDNILIAKNDKVAESYRETTWKPKFEVEKEKQKAEDESTDSDGLSGVQKKVFDVLYKVADIPFLSEYKLQILDLIEKAEKQPNITIGVIVSILVIILTVLFRLLFGGQEATKSREKSGGC

SEQ ID NO: 140 - DNA, 1377 bp, Gossypium hirsutum
atgatgataatgacgcgttacgctcttcttctcctattagctttcgcttcgctgcaactcctctgcttcgccgctgatgatgacgtggtgttctatgattcatttgaagagtcatttgatggacgatggatcgtttctgataaagatgattataaaggtgtgtggaagcattccaagagcgaggggcatgatgactatggtcttctcgtgagtgagatggcaaagaagtatgcaatagtgaaagagcttgatgaggctgtgaatctcaaagatggtaccactgtgcttcagtttgagactcgcctacagggtggactggaatgtggtggtgcatatttgaaatatcttcgtcctcaagatgctgggtggaagcctaaggagtttgacaatgaatccccttactctatcatgtttggacccgacaaatgcggggccacaaacaagttgcacttcatcctgaagcataagaatcctaaaagtggggaatacattgaacaccatctgaaataccctccttctgtcccatctgacaagcttactcatgtctacactgccatattgaagcctgacaatgaggtcagcattctgattgatggtgaggaaaagaagaaggctagcttcctttcagcagaagattttgagcctccacttatcccttccaagacaattcctgatcctgatgataagaagcccgaggactgggatgagagagcgaagattcctgatccagatgccgtgaagccagaggattgggatgaggatgcacccatggaaattgaggatgaggaggctgtgaaacccgaaagttggttagatgatgaacccgaggagattgatgatcctgaggcaaccaagcctgaagattgggatgatgaagaagatggtgagtgggaagcccccaaaattgagaacccaaagtgtgagacagcccctggttgtggcgaatggaagaggccaatgaagaggaatccagcttataaaggaaaatggtctcctccactaattgacaatcccagttacaagggtatttggaagcctcaggagattccaaaccccaactactttgagcttgaaaagcctgactttgatcctattgctgccattggtattgagatttggacaatgcaagatggtatattatttgacaatattttgatagccaaaaacgacaaggttgctgagtcatatcgggagaccacgtggaagccaaagtttgaggttgagaaggaaaaacagaaggctgaggatgaagctgccgattctgccaggctcgcagactttcagaggaaggtttttgatgtcttatacaaggttgctgacattcctttcttaagcaaatacaagcatcaaattctcgatcttattggagcatgctga

SEQ ID NO: 141 - protein, 458 aa, Gossypium hirsutum
MMIMTRYALLLLLAFASLQLLCFAADDDVVFYDSFEESFDGRWIVSDKDDYKGVWKHSKSEGHDDYGLLVSEMAKKYAIVKELDEAVNLKDGTTVLQFETRLQGGLECGGAYLKYLRPQDAGWKPKEFDNESPYSIMFGPDKCGATNKLHFILKHKNPKSGEYIEHHLKYPPSVPSDKLTHVYTAILKPDNEVSILIDGEEKKKASFLSAEDFEPPLIPSKTIPDPDDKKPEDWDERAKIPDPDAVKPEDWDEDAPMEIEDEEAVKPESWLDDEPEEIDDPEATKPEDWDDEEDGEWEAPKIENPKCETAPGCGEWKRPMKRNPAYKGKWSPPLIDNPSYKGIWKPQEIPNPNYFELEKPDFDPIAAIGIEIWTMQDGILFDNILIAKNDKVAESYRETTWKPKFEVEKEKQKAEDEAADSARLADFQRKVFDVLYKVADIPFLSKYKHQILDLIGAC

SEQ ID NO: 142 - DNA, 1227 bp, Gossypium hirsutum
atgataatgatggggcattttgcgcttcttgtcttcttagcgttcgcgtcgatgcagcttctctgcattgccgctgatcatgatgctgcgattttttatgattcatttgaagagccattcaatgggcgatggatcgtctctgataaagatgattataaaggtatatgggagcattcaaagagtgaagggcacgatgactatgggcttctagtgaccgagaaggcacggaagtacgcaatagtgaaagagctggaggagcctgtgaatctcagggatggaaccactgtgcttcagtacgaggctcgcttccagaatggacttgaatgtggtggtgcatacctgaaataccttagacctcaggaagctgggtggaagcctaaggaatttgacaatggatccccttactctatcatgtttggacctgacatatgtggattaacaaacaaggtgcactttatcctgaagcagaagaatcctaaatctggggaatatgttgaacatcatcttattgacccaccgcgcgtcccatctgacaagctttctcatgtctatactgccatcttgaagcctgacaatgagattagcattctgattgatggagaggtgaagaagaagggaaacttcctctcagctcaagattttgatcctccaattatccctgccaagactattcctgacccaaatgagaagaaacccgaggactgggacgatagagtcagaattcctgatcctaatgctgtgaagcctgatgattgggatgaaaatgcacccatggaaattgaagatatggaggctgtgaaaccggaaggatggttagacgatgagcctgaagagatagatgatcctgaggcaaccaagccagaagattgggatgatgaagaggatggtgtatgggaagcccccaaaattgacaacccaaagtgtcagacagctcctggttgtggtgaatggaagagaccgatgaagaggaacccagcttttaaaggaatatggaatcctcctctagtcgacaaccccaattacaagggtatttggaagcctagggacatcccaaaccctaactacttcgagcttgacaagccttactttgaccctatcgctgcaattggtatcgagatttggacaatgcaagaaagtatattgtttgacaatattttgatagccaaagacgaggatgttgctgaatcataccgggacaccacatggaaaccaaaggtttgtgggtga

SEQ ID NO: 143 - protein, 408 aa, Gossypium hirsutum
MIMMGHFALLVFLAFASMQLLCIAADHDAAIFYDSFEEPFNGRWIVSDKDDYKGIWEHSKSEGHDDYGLLVTEKARKYAIVKELEEPVNLRDGTTVLQYEARFQNGLECGGAYLKYLRPQEAGWKPKEFDNGSPYSIMFGPDICGLTNKVHFILKQKNPKSGEYVEHHLIDPPRVPSDKLSHVYTAILKPDNEISILIDGEVKKKGNFLSAQDFDPPIIPAKTIPDPNEKKPEDWDDRVRIPDPNAVKPDDWDENAPMEIEDMEAVKPEGWLDDEPEEIDDPEATKPEDWDDEEDGVWEAPKIDNPKCQTAPGCGEWKRPMKRNPAFKGIWNPPLVDNPNYKGIWKPRDIPNPNYFELDKPYFDPIAAIGIEIWTMQESILFDNILIAKDEDVAESYRDTTWKPKVCG

SEQ ID NO: 144 - DNA, 1740 bp, Glycine max
atgggagaacgaaaaggaatcccaattgctctggggctcttggcgatgctcctcttcttcattgcttcttcctcttcctctcacctcgttcgtgcttccgatgacgccgacgacgcgatcttctacgagtcattcgacgaggattttgacggacggtggattgtgtccgacaaggaggattacaacggtgtctggaagcatgctaagagtgatgggcatgatgattatggacttcttgttagtgaacaagcccggaaatatgctatagtcaaaaaacttgacgagcctgtcagtcttaaggatggaacagttgttcttcagtttgagactcgccttcagaatggcctcgaatgtggtggcgcatatattaaatatcttcgaccccaggagagcggatggaaaccaaaggaatttgataacgaatctccatattctatcatgtttggtcctgataagtgtggtgctacaaacaaggtgcacttcattttcaagcataagaatccaaagagtggggagtatgttgaacaccatctcaagtatcctccttctgtcccatctgacaaactaactcatgtatacactgcaattctgaagcccgataatgaattgcaaattttgattgatggtgaggagaagaaaaaggcaaatttcttgtcttctgaggactttgagcctcctcttatcccttccaagacaatccctgatcctgatgataagaaacctgaggactgggacgaaagagccaaaatcccggacccaagtgctgtgaagccagatgactgggatgaggatgcacccatggaaattttagatgaagaagcagagaaacctgaaggatggttggatgacgagccagaggaaattgatgacccagaggcgacaaaacccgaagactgggatgatgaggaggatggtgaatgggaagccccaaagattgaaaacccgaagtgtgaggcagcccctggttgtggtgaatggaagaggccaatgaagaggaatccagcttataagggaaagtggagtgctccttacatcgataaccccaattacaagggcatatggaagcctcgcgagattccaaaccctgaatactttgaactcgagaaacctgattttgagcccattgctgctcttggcattgagatttggacaatgcaggatggcatcctatttgacaatattctgatagctaacgatgataaagttgcagaatcctatcgggagaccacatggaagcccaagtttaccattgagaaagaaaaacagaaggctgaagatgaggctgcaactggttcagatggtattgcaggcttccagaagaaggtatttgacctcttgtacaagattgcagacattcccttcctgagcgaccacaaatctaagatatacgatctcattgagaaagctgagaaacagccaaatctcactattggaattcttgtagcggttgtggttgtcttcgtgtcaattttcttcaggctcatatttggtggcaagaaacctgtgagtagtgattttttttccctacgctcattcatagtatttctttcatggaattattattccgtattattttatttaaatctgataaccaagtctcttcttgtgcaggcaaaggtggagaagaaaccagaacgcacagaagcttccaataaccaaggtggtgcagagaatgaagaaaacaaagagaaagaggaagcatctaatgctccgcgtcggaggccaaggcgagaagattga

SEQ ID NO: 145 - protein, 579 aa, Glycine max
MGERKGIPIALGLLAMLLFFIASSSSSHLVRASDDADDAIFYESFDEDFDGRWIVSDKEDYNGVWKHAKSDGHDDYGLLVSEQARKYAIVKKLDEPVSLKDGTVVLQFETRLQNGLECGGAYIKYLRPQESGWKPKEFDNESPYSIMFGPDKCGATNKVHFIFKHKNPKSGEYVEHHLKYPPSVPSDKLTHVYTAILKPDNELQILIDGEEKKKANFLSSEDFEPPLIPSKTIPDPDDKKPEDWDERAKIPDPSAVKPDDWDEDAPMEILDEEAEKPEGWLDDEPEEIDDPEATKPEDWDDEEDGEWEAPKIENPKCEAAPGCGEWKRPMKRNPAYKGKWSAPYIDNPNYKGIWKPREIPNPEYFELEKPDFEPIAALGIEIWTMQDGILFDNILIANDDKVAESYRETTWKPKFTIEKEKQKAEDEAATGSDGIAGFQKKVFDLLYKIADIPFLSDHKSKIYDLIEKAEKQPNLTIGILVAVVVVFVSIFFRLIFGGKKPVSSDFFSLRSFIVFLSWNYYSVLFYLNLITKSLLVQAKVEKKPERTEASNNQGGAENEENKEKEEASNAPRRRPRRED

SEQ ID NO: 146 - DNA, 1626 bp, Glycine max
atggcaaaaccaaagcgaatctctctgcgtatctttgcgctgctcctcttgatttccacctcttcgtttcagcttctccgcgcttccgatgacgccgatgatgatgcgatcttctatgattcgttcgacgaggattttgaagaccgttgggttgtgtctcagaaagatgagtacagtggtgtctggaaacatgccaagagtgagggacatgatgattatgggcttcttgtcagtgagaaagcaaggaaatatgctatagtaaaagaacttgatgaggccgtgagtctcaaggatgaaacagttgttcttcagtttgaaactcggcttcagaatggccttgagtgtggtggtgcatatctaaaatatctccgaccacaggaggctggatggaaatccaaggaatttgataatgaatctccatattctatcatgtttggtcctgacaagtgtggtgccacaaacaaagtacacttcattttcaagcataagaatcccaagagtggggagtatgttgaacaccatcttaagaatcccccttctgtcccgtctgacaaattatctcatgtgtacactgccattttgaagcctgacaatgagttgcaaattttgattgatggggaacagaagaagaaggtaaatttcttatctgctgatgattttgaaccccctcttatccctcccaagacaatcccagatcctgatgataaaaaacctgaggactgggatgagagagagaaaattccagactcaagtgcagtaaagccagatgactgggatgagaatgcacccttggaaattgttgatgaagaagctgagaaacctgaaggatgggacaatgaacctgaggagatagatgatccagaggcaacaaaaccagaagattgggacgatgaggaggatggtgaatgggaagccccaaagattgagaacccaaaatgtgaagcagcccccggttgtggtgagtggaagaggccaatgaagaggaatccagcttacaaaggaaaatggcatgccccactaattgaaaatcctgcttataagggaatttggaagcctcaggacattccaaaccctgactactttgaaattaaaaaacctgattttgagcctattgctgctattggtattgagatttggacaatgcaagatggtatattgtttgacaacatcttgatagctaaagatgataaaattgccgagtcctaccgggagactacatggaagcccaagtttaccgtcgagaaagaaaaacagaaggaagaagattcggaagctggatcaagtggtcttgctggcttccagaagaaggtatttgacctgttatacaagatcgcagacattcccttcctgagtgcctacaagcttaaaatatacgatgtcattgagaagggtcaagagcaaccaaatctcactgttggaattgttgtagccgttgtggttgtcatcgtgtcagttttcttgaggctcatatttggtgggaagaagaagcccacaagggtggagaagacaaacgtagaaccagcagaaactgcaactagccaaggcagtggtgagaatgaggaaaacaaagagaaggaggaatcatctgcccctgcacgtcggaggccaacaaggagagataattga

SEQ ID NO: 147 - protein, 541 aa, Glycine max
MAKPKRISLRIFALLLLISTSSFQLLRASDDADDDAIFYDSFDEDFEDRWVVSQKDEYSGVWKHAKSEGHDDYGLLVSEKARKYAIVKELDEAVSLKDETVVLQFETRLQNGLECGGAYLKYLRPQEAGWKSKEFDNESPYSIMFGPDKCGATNKVHFIFKHKNPKSGEYVEHHLKNPPSVPSDKLSHVYTAILKPDNELQILIDGEQKKKVNFLSADDFEPPLIPPKTIPDPDDKKPEDWDEREKIPDSSAVKPDDWDENAPLEIVDEEAEKPEGWDNEPEEIDDPEATKPEDWDDEEDGEWEAPKIENPKCEAAPGCGEWKRPMKRNPAYKGKWHAPLIENPAYKGIWKPQDIPNPDYFEIKKPDFEPIAAIGIEIWTMQDGILFDNILIAKDDKIAESYRETTWKPKFTVEKEKQKEEDSEAGSSGLAGFQKKVFDLLYKIADIPFLSAYKLKIYDVIEKGQEQPNLTVGIVVAVVVVIVSVFLRLIFGGKKKPTRVEKTNVEPAETATSQGSGENEENKEKEESSAPARRRPTRRDN

SEQ ID NO: 148 - DNA, 1653 bp, Glycine max
atgggagaacgaaaaggaatcccaatggctttggggctcttggcgatgatcctcttcttcattgcttcctcttcctctcacctcgttcgcgcttccgatgacgccgacgacgcgatcttctacgagtcgttcgacgaggattttgatggacggtggattgtatccgacaaggaggattacaatggtgtctggaagcatgccaagagtgatgggcatgatgattatggacttcttgttagtgaacaagccaggaaatatgctatagtcaaagaacttgccgagtctgtcagtcttaaggatggaacagttgttcttcagtttgagactcgccttcagaatggcctcgaatgtggtggtgcatatattaaatatcttcgaccccaggagagcggatggaaaccaaaggaatttgacaacgaatctccatattctatcatgtttggtcctgataagtgtggtgctacaaacaaggttcacttcattttcaagcataagaacccaaagagtggggagtatgttgagcatcatctcaagtatcccccttctgtcccatcggacaaactaactcatgtgtacactgcaattctgaagcctgataatgaattgcaaatcttgattgatggggaggagaagaaaaaggcaaatttcttgtcttctgaggactttgagcctcctcttataccttccaagacaatccctgatcctgatgataagaaacctgaggactgggacgaaagagccaaaatcccagacccaagtgctgtgaagccagatgactgggatgaggatgcacccatggaaatcttagatgaagaagcagagaaacctgaaggatggttggatgatgagccagaggaaattgatgacccagaggcaactaaaccagaagactgggatgatgaggaggatggtgaatgggaagccccaaagattgaaaacccaaagtgtgaggccgcccctggttgtggtgaatggaagaggccaacgaagaggaatccagcttataagggaaagtggagtgctccttacatcgataaccccagttacaagggcatatggaagcctcgcgagattccaaaccctgaatactttgaactcgcaaaacctgattttgagcctattgctgctattggcattgagatttggacaatgcaggatggcatcctatttgacaatgttctgatagctaacgatgataaagttgcagaatcctatcgggagactacatggaagcccaagtttaccgttgagaaagacaaactgaaggctgaagaggaggcggcaacgggttcagatggtatttcaggcttccagaagaaggtatttgacctcttgtacaagattgcagatattcccttcttgagcgagcacaaatctaagattttcgatctcattgagaaagctgagaaacagccaaatctcacaattggaattcttgtagctgttgtggttgtcttcgtgtcaattttcttcagactcatatttggtggcaagaaacctgtgagtagtgaaattattttccccacactcattcagagtatttctttcatggaattattattccttatgattgcgtttaaatctcgtaaccaagcctcttcttgtgcaggcaaaggtggagaagaaaccagaacgcacagaagcttccaataa

SEQ ID NO: 149 - protein, 550 aa, Glycine max
MGERKGIPMALGLLAMILFFIASSSSHLVRASDDADDAIFYESFDEDFDGRWIVSDKEDYNGVWKHAKSDGHDDYGLLVSEQARKYAIVKELAESVSLKDGTVVLQFETRLQNGLECGGAYIKYLRPQESGWKPKEFDNESPYSIMFGPDKCGATNKVHFIFKHKNPKSGEYVEHHLKYPPSVPSDKLTHVYTAILKPDNELQILIDGEEKKKANFLSSEDFEPPLIPSKTIPDPDDKKPEDWDERAKIPDPSAVKPDDWDEDAPMEILDEEAEKPEGWLDDEPEEIDDPEATKPEDWDDEEDGEWEAPKIENPKCEAAPGCGEWKRPTKRNPAYKGKWSAPYIDNPSYKGIWKPREIPNPEYFELAKPDFEPIAAIGIEIWTMQDGILFDNVLIANDDKVAESYRETTWKPKFTVEKDKLKAEEEAATGSDGISGFQKKVFDLLYKIADIPFLSEHKSKIFDLIEKAEKQPNLTIGILVAVVVVFVSIFFRLIFGGKKPVSSEIIFPTLIQSISFMELLFLMIAFKSRNQASSCAGKGGEETRTHRSFQ

SEQ ID NO: 150 - DNA, 1617 bp, Glycine max
atgggagaaccaaaacgaatctatctgcgtatctttgcgctgctcctcttcatttccgcctcttcgtttcagcttctccgcgctttcgatgacgcgatcttttacgagtcgttcgacgaggatttcgaagaccgttggattgtgtctcagaaagatgagtacaatggtgtctggaaacatgccaagagtgagggacatgatgattatgggcttcttgtcagtgagaaagtaaggaaatatgctatagtaaaagaacttgatgaggccgtgggtctcaaggatgaaacagttgttcttcagtttgaaactcggcttcagaatggccttgagtgtggtggtgcatatctaaaatatctccgaccacaggaggctggatggaaatccaaggaatttgataatgaatctccatattctatcatgtttggtcctgacaagtgtggtgccacaaacaaagtacacttcattttcaagcataaaaatcccaagagtggggagtatgttgaacaccatcttaagaatcccccttctgtcccgtctgacaaattatctcatgtgtacacggccattttgaagtctgacaatgagttgcaaatattgattgatggggaacagaagaagaaggtaaatttcttatctgctgatgattttgaaccccctcttatccctcccaagacaatcccagattctgatgataagaaacctgaggactgggatgagagagagaaaattccagaccctagtgcagtaaagccagatgactgggatgaggatgcacccttggaaattgttgatgaagaagcagagaaacctgaaggatggttagacaatgaacccgaggagattgatgatccagaggcaacaaaaccagaagattgggatgatgaggaggatggtgaatgggaagccccaaagattgagaacccaaaatgtgaagcagcccccggttgtggtgagtggaagaggccaatgaagaggaatccagcttataaaggaaaatggcatgccccacttattgaaaatcctgcttataagggtatttggaagcctcgggatattccaaaccctgattactttgaacttaagaaacctgattttgagcctatcgctgctatcggtattgagatttggacgatgcaagatggcatattgtttgacaacatcttgatatctaaagatgataaaattgccgagtcttatcgggagactagatggaagcccaagtttaccgttgagaaagaaaaacagaaggaagaagattcagaagctggatcaagtggccttgctggcttccagaagaaggtatttgacctgttatacaagatcgcagatattcccttcctgagtgcctacaagcttaaaatatacgatgtcattgagaagggtcaagagcaaccaaatctcaccgttggaattgttgtcgccgttgtggttgtcatcttgtcaattttcttgaggctcatatttggagggaagaagaagccaacaagggtggagaagacaaacccagaacccgcagaaactgcgagtagccaaggcagtggtgagaatgaagaaaacaaagagaaggaggaatcatctgcccctgcacgtcggaagccaacaaggagagacaattga

SEQ ID NO: 151 - protein, 538 aa, Glycine max
MGEPKRIYLRIFALLLFISASSFQLLRAFDDAIFYESFDEDFEDRWIVSQKDEYNGVWKHAKSEGHDDYGLLVSEKVRKYAIVKELDEAVGLKDETVVLQFETRLQNGLECGGAYLKYLRPQEAGWKSKEFDNESPYSIMFGPDKCGATNKVHFIFKHKNPKSGEYVEHHLKNPPSVPSDKLSHVYTAILKSDNELQILIDGEQKKKVNFLSADDFEPPLIPPKTIPDSDDKKPEDWDEREKIPDPSAVKPDDWDEDAPLEIVDEEAEKPEGWLDNEPEEIDDPEATKPEDWDDEEDGEWEAPKIENPKCEAAPGCGEWKRPMKRNPAYKGKWHAPLIENPAYKGIWKPRDIPNPDYFELKKPDFEPIAAIGIEIWTMQDGILFDNILISKDDKIAESYRETRWKPKFTVEKEKQKEEDSEAGSSGLAGFQKKVFDLLYKIADIPFLSAYKLKIYDVIEKGQEQPNLTVGIVVAVVVVILSIFLRLIFGGKKKPTRVEKTNPEPAETASSQGSGENEENKEKEESSAPARRKPTRRDN

SEQ ID NO: 152 - DNA, 1320 bp, Glycine max
atggcggaaaatgcttcgattgagctgaacaagtttgtgttcttttgtttgttggtgctaatacaagtggcagtttctgaaatcatttttgaagagcgttttgatgatggatggcgaggtaggtgggtgaagtcagactggaaaagcagtgaaggcaaagcaggttcattcaagcacacagctggaaaatgggccagtgatccagatgataaaggtattcaaacatccagtgatgccaaacactttgccatctctgcaaaaataccagaattcacaaacaagaacagaacattggtccttcagtattctgtaaaatttgagcaagagattgaatgtggtggaggttacatcaagcttctctctggatttgttaatcaaaagaagtttggtggggatacaccatatattttaatgtttggaccagatttatgtggcacggatacaaagaagctccatgtgatactctcctaccacggtcaaaattaccccataaagaaggacctgcaatgtgaaactgacaggttaactcacttctacacattcattctcaggccagatgccacatacagtgtcctggttgacaatagagagagagattccggaagcatgtatacagattgggatattcttcctccacgaaaaatcaaagatgtcaaggccaaaaagcctaaagactgggaagaaagagaatacattgaagaccctaatgatgtcaaacctgagggatatgattcgatcccaagagaaattcctgacccaaatgctaaagagcctgaaaactgggatgaagaggaagatgggaaatggaaaccaccaaagataccaaatccagcatacaaaggaccatggaaaagaaagaaaatcaagaaccctaactacaaagggaaatggaaaactccatggatagataatccagaatttgaagacgaccctgatctttatgtgcttaagcctatcaagtatgtgggcattgaagtttggcaggttaaaggcggttcagtttttgacaatgttttgatttgtgatgaccctgattatgcaaaacaagttgttgaggaagtgtttgccaacagggagattgaaaaggaaggttttgaagaagcagagaaagtaaggaaagccaaagaggaggaggaggctcaaagagcaagagaagaaggtgaaaagcgtagacgagagagaggtcatgatcgacgataccgggacaaatatagagacaaatatagaagggtatgtatcatacatgaatacattcaatgtttattcttttcctgtttcatgaatcttcactcctttttgaggataagacaaatggcatag

SEQ ID NO: 153 - protein, 439 aa, Glycine max
MAENASIELNKFVFFCLLVLIQVAVSEIIFEERFDDGWRGRWVKSDWKSSEGKAGSFKHTAGKWASDPDDKGIQTSSDAKHFAISAKIPEFTNKNRTLVLQYSVKFEQEIECGGGYIKLLSGFVNQKKFGGDTPYILMFGPDLCGTDTKKLHVILSYHGQNYPIKKDLQCETDRLTHFYTFILRPDATYSVLVDNRERDSGSMYTDWDILPPRKIKDVKAKKPKDWEEREYIEDPNDVKPEGYDSIPREIPDPNAKEPENWDEEEDGKWKPPKIPNPAYKGPWKRKKIKNPNYKGKWKTPWIDNPEFEDDPDLYVLKPIKYVGIEVWQVKGGSVFDNVLICDDPDYAKQVVEEVFANREIEKEGFEEAEKVRKAKEEEEAQRAREEGEKRRRERGHDRRYRDKYRDKYRRVCIIHEYIQCLFFSCFMNLHSFLRIRQMA

SEQ ID NO: 154 - DNA, 1308 bp, Glycine max
atggcgtttcgggtgcgaagccctgacctccgctctctctttcttctctctctcttgtccatcgcttccgccaatgtcttcttcgaagagcgtttcgatgacgggtgggaaaatcgatgggttaaatcagattggaaaaaagatgagaacgtggctggggagtggaaccacacctctggtcaatggaatggagacgctaatgacaaaggtattcaaaccagtgaggattacagattctatgctatttcagctgagtaccctgaattcagcaacaagggtaagacactagtctttcaattttctgttaagcacgaacagaagcttgactgtggtggtggctacatgaagttgctcagtggggatgttgatcagaagaaatttggcggggatactccttacagtattatgtttggcccagatatctgcggttacagtaccaagaaagttcacgctattcttacctacaataacacaaaccacttgataaagaaggatgttccttgtgagactgaccaacttactcatgtttacacatttatcctccgtccggatgcaacctacagcatcctgattgataatgtggagaagcaaactggtagtctctactctgattgggatcttctccctccaaagacaatcaaggatcctgaggctaaaaaaccagaagattgggatgacaaagaatatattcctgatcctgaggataagaaaccagaggggtatgatgacatcccaaaagagctcccagaccccgaagccaagaagcctgaagattgggatgatgaggaagatggtgagtggacaccccctaccattgccaaccctgagtacaagggcccatggaaggcagagaaaatcaagaaccccaactataaaggaaaatggaaggcaccattgattgataacccagatttcaaggatgaccccgacctctatgttttccccaacttgaagtacgtggggattgaattgtggcaggtgaaatctggtactttgtttgacaatgtcttaattactgatgatcctgagtatgctaagcagctggttgaagaaacatggggcaagcacaaggatgctgagaaggcagcatttgaggaggccgagaagaagagggaagaggaggaatcaaaggatgacccagttgactctgatgctgatgaggaagaggaagatgctgatgaagctggcaatgactccgatgctgaatcaaagacggaagctggagaagacaccaaggaagagggtgtacatgtaagtttttccatccccttatctcactttaatcaaacttggcatcaatgtatttaa

SEQ ID NO: 155 - protein, 435 aa, Glycine max
MAFRVRSPDLRSLFLLSLLSIASANVFFEERFDDGWENRWVKSDWKKDENVAGEWNHTSGQWNGDANDKGIQTSEDYRFYAISAEYPEFSNKGKTLVFQFSVKHEQKLDCGGGYMKLLSGDVDQKKFGGDTPYSIMFGPDICGYSTKKVHAILTYNNTNHLIKKDVPCETDQLTHVYTFILRPDATYSILIDNVEKQTGSLYSDWDLLPPKTIKDPEAKKPEDWDDKEYIPDPEDKKPEGYDDIPKELPDPEAKKPEDWDDEEDGEWTPPTIANPEYKGPWKAEKIKNPNYKGKWKAPLIDNPDFKDDPDLYVFPNLKYVGIELWQVKSGTLFDNVLITDDPEYAKQLVEETWGKHKDAEKAAFEEAEKKREEEESKDDPVDSDADEEEEDADEAGNDSDAESKTEAGEDTKEEGVHVSFSIPLSHFNQTWHQCI

SEQ ID NO: 156 - DNA, 1269 bp, Glycine max
atgacgatggcgtttagggtgcgaaaccctgacctccgctttctcattcttctctctctcttgtccatcacttccgccaaggtcttcttcgaggagcgtttcgatgacggatggggaaatcgttgggttaaatcagattggaaaaaagatgagaacctggctggggagtggaaccacacctctggccaatggaatggagacgctaacgacaaaggtattcaaaccagtgaggattacagattctacgctatttcagctcagtaccctgaattcagcaacaaggataagacactagtcttccaattttctgtcaagcatgaacagaagcttgactgcggtggtggctacatgaagttgctcagtggtgatgttgatcagaagaaatttggtggggatactccttacagtattatgtttggcccagatatctgtggttacagtacaaagaaagtacacgctattcttacctacaatgacacaaaccacttgataaagaaggatgttccttgtgagactgaccaacttactcatgtttacacatttatcctccgtccggatgcaacctacagcatcctgattgataatgtggagaagcaaactggtagtctctactctgattgggatcttctccctccaaagacaatcaaagatcccgaggctaaaaaaccagaagattgggatgacaaagaatttattcctgatcccgaggataagaaaccagaggggtatgatgacatcccaaaagagctcccagatcctgaagccaagaagcctgaagattgggatgatgaggaagatggtgagtggacaccccctaccattgccaaccctgattacaagggcccatggaaggcaaagaaaatcaagaaccccaactataaaggaaaatggaaggcaccattgattgataacccagatttcaaggatgaccccgacctatatgttttccccaacttgaagtacgtgggcattgaattgtggcaggtgaaatctggtactttgtttgacaatgtcttaattactgatgatcctgaatatgccaagcaactggctgaagaaacatggggcaagcacaaggatgttgagaagacagcatttgaagaggctgagaagaagagggaagaggaggaatcaaaggatgacccagttgactctgatgctgatgaggaagaggaagatgctgatgaagctggcaatgactccgatgctgaatcaaagacggaagctggggaagacaccaaggaagagggtgtacatgatgaactctag

SEQ ID NO: 157 - protein, 422 aa, Glycine max
MTMAFRVRNPDLRFLILLSLLSITSAKVFFEERFDDGWGNRWVKSDWKKDENLAGEWNHTSGQWNGDANDKGIQTSEDYRFYAISAQYPEFSNKDKTLVFQFSVKHEQKLDCGGGYMKLLSGDVDQKKFGGDTPYSIMFGPDICGYSTKKVHAILTYNDTNHLIKKDVPCETDQLTHVYTFILRPDATYSILIDNVEKQTGSLYSDWDLLPPKTIKDPEAKKPEDWDDKEFIPDPEDKKPEGYDDIPKELPDPEAKKPEDWDDEEDGEWTPPTIANPDYKGPWKAKKIKNPNYKGKWKAPLIDNPDFKDDPDLYVFPNLKYVGIELWQVKSGTLFDNVLITDDPEYAKQLAEETWGKHKDVEKTAFEEAEKKREEEESKDDPVDSDADEEEEDADEAGNDSDAESKTEAGEDTKEEGVHDEL

SEQ ID NO: 158 - DNA, 1269 bp, Glycine max
atggcggaaaatgcttcgattgagctgaacaagtttgtgttcttttgtttgttggtgctaatacaagtggcagtttctgaaatcatttttgaagagcgttttgatgatggatggcgaggtaggtgggtgaagtcagactggaaaagcagtgagggcaaagcaggttcattcaagcacacagctggaaaatgggccggtgatccagatgataaaggtattcaaacatccagtgatgccaaacactttgccatctctgcaaaaataccagaattcacaaacaagaacagaacattggtccttcagtattctgtaaaatttgagcaagagattgaatgtggtggaggttacatcaagcttctctctggatttgttaatcaaaagaagtttggtggggatacaccatatattttaatgtttggaccaaatttatgtggcacggatacaaagaagctccatgtgatactctcctaccacggtcaaaattaccccataaagaaggacctgcaatgtgaaactgacaggttaactcacttctacacattcattctcaggccagatgccacatacagtgtcctggttgacaatagagagagagattccggaagcatgtatacagattgggatattcttcctccacgaaaaatcaaagatgtcaaggccaaaaagcctaaagactgggaagaaagagaatacattgaagaccctaatgatgtcaaacctgagggatatgattcgatcccaagagaaattcctgacccaaatgctaaagagcctgaaaactgggatgaagaggaagatgggaaatggaaaccaccaaagataccaaatccagcatacaaaggaccatggaaaagaaagaaaatcaagaaccctaactacaaagggaaatggaaaactccatggatagataatccagaatttgaagacgaccctgatctttatgtgcttaagcctatcaagtatgtgggcattgaagtttggcaggttaaaggcggttcagtttttgacaatgttttgatttgtgatgaccctgattatgcaaaacaagttgttgaggaagtgtttgccaacagggagattgaaaaggaaggttttgaagaagcagagaaagtaaggaaagccaaagaggaggaggaggctcaaagagcaagagaagaaggtgaaaagcgtagacgagagagaggtcatgatcgacgataccgggacaaatatagagacaaatatagaaggcatcgccaccatgattacgatgatcatgacgagctttga

SEQ ID NO: 159 - protein, 422 aa, Glycine max
MAENASIELNKFVFFCLLVLIQVAVSEIIFEERFDDGWRGRWVKSDWKSSEGKAGSFKHTAGKWAGDPDDKGIQTSSDAKHFAISAKIPEFTNKNRTLVLQYSVKFEQEIECGGGYIKLLSGFVNQKKFGGDTPYILMFGPNLCGTDTKKLHVILSYHGQNYPIKKDLQCETDRLTHFYTFILRPDATYSVLVDNRERDSGSMYTDWDILPPRKIKDVKAKKPKDWEEREYIEDPNDVKPEGYDSIPREIPDPNAKEPENWDEEEDGKWKPPKIPNPAYKGPWKRKKIKNPNYKGKWKTPWIDNPEFEDDPDLYVLKPIKYVGIEVWQVKGGSVFDNVLICDDPDYAKQVVEEVFANREIEKEGFEEAEKVRKAKEEEEAQRAREEGEKRRRERGHDRRYRDKYRDKYRRHRHHDYDDHDEL

SEQ ID NO: 160 - DNA, 1149 bp, Glycine max
atgggagaacgaaaaggaatcccaattgctctggggctcttggcgatgctcctcttcttcattgcttcttcctcttcctctcacctcgttcgtgcttccgatgacgccgacgacgcgatcttctacgagtcattcgacgaggattttgacggacggtggattgtgtccgacaaggaggattacaacggtgtctggaagcatgctaagagtgatgggcatgatgattatggacttcttgttagtgaacaagcccggaaatatgctatagtcaaaaaacttgacgagcctgtcagtcttaaggatggaacagttgttcttcagtttgagactcgccttcagaatggcctcgaatgtggtggcgcatatattaaatatcttcgaccccaggagagcggatggaaaccaaaggaatttgacaacgaatctccatattctatcatgtttggtcctgataagtgtggtgctacaaacaaggttcacttcattttcaagcataagaacccaaagagtggggagtatgttgagcaccatctcaagtatcccccttctgtcccatcggacaaactaactcatgtgtacactgcaattctgaagcctgataatgaattgcaaatcttgattgatggggaggagaagaaaaaggcaaatttcttgtcttctgaggactttgagcctcctcttataccttccaagacaatccctgatcctgatgataagaaacctgaggactgggacgaaagagccaaaatcccggacccaagtgctgtgaagccagatgactgggatgaggatgcacccatggaaatcttagatgaagaagcagagaaacctgaaggatggttggatgatgagccagaggaaattgatgacccagaggcaactaaaccagaagactgggatgatgaggaggatggtgaatgggaagccccaaagattgaaaacccaaagtgtgaggccgcccctggttgtggtgaatggaagaggccaacgatgaggaatccagcttataatggacagtggagggctgctgtcgtcgataaccccagttacaatggcatatgtgagcctcgcgagatagcaaacgctgtatacttagaactctcatacgctgattttgagcctatagctgctataggcattgagaattga

SEQ ID NO: 161 - protein, 382 aa, Glycine max
MGERKGIPIALGLLAMLLFFIASSSSSHLVRASDDADDAIFYESFDEDFDGRWIVSDKEDYNGVWKHAKSDGHDDYGLLVSEQARKYAIVKKLDEPVSLKDGTVVLQFETRLQNGLECGGAYIKYLRPQESGWKPKEFDNESPYSIMFGPDKCGATNKVHFIFKHKNPKSGEYVEHHLKYPPSVPSDKLTHVYTAILKPDNELQILIDGEEKKKANFLSSEDFEPPLIPSKTIPDPDDKKPEDWDERAKIPDPSAVKPDDWDEDAPMEILDEEAEKPEGWLDDEPEEIDDPEATKPEDWDDEEDGEWEAPKIENPKCEAAPGCGEWKRPTMRNPAYNGQWRAAVVDNPSYNGICEPREIANAVYLELSYADFEPIAAIGIEN

SEQ ID NO: 162 - DNA, 1263 bp, Glycine max
atggcgtttcgggtgcgaagccctgacctccgctctctctttcttctctctctcttgtccatcgcttccgccaatgtcttcttcgaagagcgtttcgatgacgggtgggaaaatcgatgggttaaatcagattggaaaaaagatgagaacgtggctggggagtggaaccacacctctggtcaatggaatggagacgctaatgacaaaggtattcaaaccagtgaggattacagattctatgctatttcagctgagtaccctgaattcagcaacaagggtaagacactagtctttcaattttctgttaagcacgaacagaagcttgactgtggtggtggctacatgaagttgctcagtggggatgttgatcagaagaaatttggcggggatactccttacagtattatgtttggcccagatatctgtggttacagtacaaagaaagttcacgctattcttacctacaatgacacaaaccacttgataaagaaggatgttccttgtgagactgaccaacttactcatgtttacacatttatcctccgtccggatgcaacctacagcatcctgattgataatgtggagaagcaaactggtagtctctactctgattgggatcttctccctccaaagacaatcaaggatcctgaggctaaaaaaccagaagattgggatgacaaagaatatattcctgatcctgaggataagaaaccagaggggtatgatgacatcccaaaagagctcccagaccccgaagccaagaagcctgaagattgggatgatgaggaagatggtgagtggacaccccctaccattgccaaccctgagtacaagggcccatggaaggcagagaaaatcaagaaccccaactataaaggaaaatggaaggcaccattgattgataacccagatttcaaggatgaccccgacctctatgttttccccaacttgaagtacgtggggattgaattgtggcaggtgaaatctggtactttgtttgacaatgtcttaattactgatgatcctgagtatgctaagcagctggttgaagaaacatggggcaagcacaaggatgctgagaaggcagcatttgaggaggccgagaagaagagggaagaggaggaatcaaaggatgacccagttgactctgatgctgatgaggaagaggaagatgctgatgaagctggcaatgactccgatgctgaatcaaagacggaagctggagaagacaccaaggaagagggtgtacatgatgaactctag

SEQ ID NO: 163 - protein, 420 aa, Glycine max
MAFRVRSPDLRSLFLLSLLSIASANVFFEERFDDGWENRWVKSDWKKDENVAGEWNHTSGQWNGDANDKGIQTSEDYRFYAISAEYPEFSNKGKTLVFQFSVKHEQKLDCGGGYMKLLSGDVDQKKFGGDTPYSIMFGPDICGYSTKKVHAILTYNDTNHLIKKDVPCETDQLTHVYTFILRPDATYSILIDNVEKQTGSLYSDWDLLPPKTIKDPEAKKPEDWDDKEYIPDPEDKKPEGYDDIPKELPDPEAKKPEDWDDEEDGEWTPPTIANPEYKGPWKAEKIKNPNYKGKWKAPLIDNPDFKDDPDLYVFPNLKYVGIELWQVKSGTLFDNVLITDDPEYAKQLVEETWGKHKDAEKAAFEEAEKKREEEESKDDPVDSDADEEEEDADEAGNDSDAESKTEAGEDTKEEGVHDEL

SEQ ID NO: 164 - DNA, 1644 bp, Glycine max
atgggagaacgaaaaggaatcccaattgctctggggctcttggcgatgctcctcttcttcattgcttcttcctcttcctctcacctcgttcgtgcttccgatgacgccgacgacgcgatcttctacgagtcattcgacgaggattttgacggacggtggattgtgtccgacaaggaggattacaacggtgtctggaagcatgctaagagtgatgggcatgatgattatggacttcttgttagtgaacaagcccggaaatatgctatagtcaaaaaacttgacgagcctgtcagtcttaaggatggaacagttgttcttcagtttgagactcgccttcagaatggcctcgaatgtggtggcgcatatattaaatatcttcgaccccaggagagcggatggaaaccaaaggaatttgacaacgaatctccatattctatcatgtttggtcctgataagtgtggtgctacaaacaaggttcacttcattttcaagcataagaacccaaagagtggggagtatgttgagcatcatctcaagtatcccccttctgtcccatcggacaaactaactcatgtgtacactgcaattctgaagcccgataatgaattgcaaatcttgattgatggggaggagaagaaaaaggcaaatttcttgtcttctgaggactttgagcctcctcttatcccttccaagacaatccctgatcctgatgataagaaacctgaggactgggacgaaagagccaaaatcccggacccaagtgctgtgaagccagatgactgggatgaggatgcacccatggaaattttagatgaagaagcagagaaacctgaaggatggttggatgacgagccagaggaaattgatgacccagaggcgacaaaacccgaagactgggatgatgaggaggatggtgaatgggaagccccaaagattgaaaacccgaagtgtgaggcagcccctggttgtggtgaatggaagaggccaatgaagaggaatccagcttataagggaaagtggagtgctccttacatcgataaccccaattacaagggcatatggaagcctcgcgagattccaaaccctgaatactttgaactcgcaaaacctgattttgagcctattgctgctattggcattgagatttggacaatgcaggatggcatcctatttgacaatgttctgatagctaacgatgataaagttgcagaatcctatcgggagactacatggaagcccaagtttaccgttgagaaagacaaactgaaggctgaagaggaggcggcaacgggttcagatggtatttcaggcttccagaagaaggtatttgacctcttgtacaagattgcagatattcccttcttgagcgagcacaaatctaagattttcgatctcattgagaaagctgagaaacagccaaatctcacaattggaattcttgtagctgttgtggttgtcttcgtgtcaattttcttcagactcatatttggtggcaagaaacctgcaaaggtggagaagaaaccagaacgcacagaagcttccaataaccaaggtagtggagagaatgaagaaaacaaagagaaggagaaacagaaagaggaagcatctaatgctgcgcgtcggaggccaaggcgagaaacttga

SEQ ID NO: 165 - protein, 547 aa, Glycine max
MGERKGIPIALGLLAMLLFFIASSSSSHLVRASDDADDAIFYESFDEDFDGRWIVSDKEDYNGVWKHAKSDGHDDYGLLVSEQARKYAIVKKLDEPVSLKDGTVVLQFETRLQNGLECGGAYIKYLRPQESGWKPKEFDNESPYSIMFGPDKCGATNKVHFIFKHKNPKSGEYVEHHLKYPPSVPSDKLTHVYTAILKPDNELQILIDGEEKKKANFLSSEDFEPPLIPSKTIPDPDDKKPEDWDERAKIPDPSAVKPDDWDEDAPMEILDEEAEKPEGWLDDEPEEIDDPEATKPEDWDDEEDGEWEAPKIENPKCEAAPGCGEWKRPMKRNPAYKGKWSAPYIDNPNYKGIWKPREIPNPEYFELAKPDFEPIAAIGIEIWTMQDGILFDNVLIANDDKVAESYRETTWKPKFTVEKDKLKAEEEAATGSDGISGFQKKVFDLLYKIADIPFLSEHKSKIFDLIEKAEKQPNLTIGILVAVVVVFVSIFFRLIFGGKKPAKVEKKPERTEASNNQGSGENEENKEKEKQKEEASNAARRRPRRET

SEQ ID NO: 166 - DNA, 1266 bp, Glycine max
atggcggaaaatgcttcgattgagctgaacaagtttgtgttcttttgtttgttggtgctaatacaagtggcagtttctgaaatcatttttgaagagcgttttgatgatggatggcgaggtaggtgggtgaagtcagactggaaaagcagtgaaggcaaagcaggttcattcaagcacacagctggaaaatgggccagtgatccagatgataaaggtattcaaacatccagtgatgccaaacactttgccatctctgcaaaaataccagaattcacaaacaagaacagaacattggtccttcagtattctgtaaaatttgagcaagagattgaatgtggtggaggttacatcaagcttctctctggatttgttaatcaaaagaagtttggtggggatacaccatatattttaatgtttggaccagatttatgtggcacggatacaaagaagctccatgtgatactctcctaccacggtcaaaattaccccataaagaaggacctgcaatgtgaaactgacaggttaactcacttctacacattcattctcaggccagatgccacatacagtgtcctggttgacaatagagagagagattccggaagcatgtatacagattgggatattcttcctccacgaaaaatcaaagatgtcaaggccaaaaagcctaaagactgggaagaaagagaatacattgaagaccctaatgatgtcaaacctgagggatatgattcgatcccaagagaaattcctgacccaaatgctaaagagcctgaaaactgggatgaagaggaagatgggaaatggaaaccaccaaagataccaaatccagcatacaaaggaccatggaaaagaaagaaaatcaagaaccctaactacaaagggaaatggaaaactccatggatagataatccagagtttgaagacgaccctgatctttatgtgcttaagcctatcaagtatgtaggcattgaagtttggcaggttaaaggcggttcagtttttgacaacgttttgatttgtgacgaccctgattatgcaaaacaagttgttgaggaggtgtttgccaacagggagattgaaaaggaaggttttgaggaagcagagaaagtgagaaaagccaaagaggaggaggaggctcaaagagcaagagaagaaggtgaaaggcgtagacgagagagaggtcatgatcgacgatatcgggacagatatagagacaaatatagaaggcatcgctatgattacgatggtcatgacgagctttga

SEQ ID NO: 167 - protein, 421 aa, Glycine max
MAENASIELNKFVFFCLLVLIQVAVSEIIFEERFDDGWRGRWVKSDWKSSEGKAGSFKHTAGKWASDPDDKGIQTSSDAKHFAISAKIPEFTNKNRTLVLQYSVKFEQEIECGGGYIKLLSGFVNQKKFGGDTPYILMFGPDLCGTDTKKLHVILSYHGQNYPIKKDLQCETDRLTHFYTFILRPDATYSVLVDNRERDSGSMYTDWDILPPRKIKDVKAKKPKDWEEREYIEDPNDVKPEGYDSIPREIPDPNAKEPENWDEEEDGKWKPPKIPNPAYKGPWKRKKIKNPNYKGKWKTPWIDNPEFEDDPDLYVLKPIKYVGIEVWQVKGGSVFDNVLICDDPDYAKQVVEEVFANREIEKEGFEEAEKVRKAKEEEEAQRAREEGERRRRERGHDRRYRDRYRDKYRRHRYDYDGHDEL

SEQ ID NO: 168 - DNA, 1263 bp, Glycine max
atggcgtttcgggtgcgaagccctgacctccgctctctctttcttctctctctcttgtccatcgcttccgccaatgtcttcttcgaagagcgtttcgatgacgggtgggaaaatcgatgggttaaatcagattggaaaaaagatgagaacgtggctggggagtggaaccacacctctggtcaatggaatggagacgctaatgacaaaggtattcaaaccagtgaggattacagattctatgctatttcagctgagtaccctgaattcagcaacaagggtaagacactagtctttcaattttctgttaagcacgaacagaagcttgactgtggtggtggctacatgaagttgctcagtggggatgttgatcagaagaaatttggcggggatactccttacagtattatgtttggcccagatatctgcggttacagtaccaagaaagttcacgctattcttacctacaataacacaaaccacttgataaagaaggatgttccttgtgagactgaccaacttactcatgtttacacatttatcctccgtccggatgcaacctacagcatcctgattgataatgtggagaagcaaactggtagtctctactctgattgggatcttctccctccaaagacaatcaaggatcctgaggctaaaaaaccagaagattgggatgacaaagaatatattcctgatcctgaggataagaaaccagaggggtatgatgacatcccaaaagagctcccagaccccgaagccaagaagcctgaagattgggatgatgaggaagatggtgagtggacaccccctaccattgccaaccctgagtacaagggcccatggaaggcagagaaaatcaagaaccccaactataaaggaaaatggaaggcaccattgattgataacccagatttcaaggatgaccccgacctctatgttttccccaacttgaagtacgtggggattgaattgtggcaggtgaaatctggtactttgtttgacaatgtcttaattactgatgatcctgaatatgccaagcaactggctgaagaaacatggggcaagcacaaggatgttgagaagacagcatttgaagaggctgagaagaagagggaagaggaggaatcaaaggatgacccagttgactctgatgctgatgaggaagaggaagatgctgatgaagctggcaatgactccgatgctgaatcaaagacggaagctggggaagacaccaaggaagagggtgtacatgatgaactctag

SEQ ID NO: 169 - protein, 420 aa, Glycine max
MAFRVRSPDLRSLFLLSLLSIASANVFFEERFDDGWENRWVKSDWKKDENVAGEWNHTSGQWNGDANDKGIQTSEDYRFYAISAEYPEFSNKGKTLVFQFSVKHEQKLDCGGGYMKLLSGDVDQKKFGGDTPYSIMFGPDICGYSTKKVHAILTYNNTNHLIKKDVPCETDQLTHVYTFILRPDATYSILIDNVEKQTGSLYSDWDLLPPKTIKDPEAKKPEDWDDKEYIPDPEDKKPEGYDDIPKELPDPEAKKPEDWDDEEDGEWTPPTIANPEYKGPWKAEKIKNPNYKGKWKAPLIDNPDFKDDPDLYVFPNLKYVGIELWQVKSGTLFDNVLITDDPEYAKQLAEETWGKHKDVEKTAFEEAEKKREEEESKDDPVDSDADEEEEDADEAGNDSDAESKTEAGEDTKEEGVHDEL

SEQ ID NO: 170 - DNA, 1254 bp, Gossypium raimondii
atggcgattcctaaacgaaaccctattttcctatctgtaatctttgtttcgctcctcgccatcgcctccgctaaagtattcttcgaagaacgttttgatgagggatgggaaagtcggtgggtaaaatctgactggaaaaaggatgagaacatggctggggagtggaattacacttctggaaaatggaatggagatcctaacgacaagggtattcaaactagtgaagactacaggttctatgctatttcagctgagttcccagaagtcaacaacaaagataagactctagtcttccaattttctgtcaagcatgagcaaaagcttgattgtggtggtggctacatgaagttgctcagcggtgacattgaccagaagaaatttggtggtgaaaccccatacagcatcatgtttgggcctgatatctgcggctatagcactaagaaagtgcatgctattctcacctacaatgggacaaaccacttgatcaaaaaggaagttccttgtgagactgaccaactcactcatgtttatacgttcattctccgtccggatgctacctacagtatccttgttgacaatgttgagaaacaaactggtagcttgtacactgattgggatcttctcccacctaagaaaataaaggatcctgaggccaagaagcctgaagattgggatgacaaggaatacatccctgatcccgaagacaagaagcctgagggttatgatgacattccaaaagaaattccagatcctgatgctaagaagcctgaagattgggatgatgaagaagatggtgaatggacaccttcaactattcccaatcctgaatacaagggcccatggaatccaaagaaaatcaagaaccccaactacaagggcaagtggaaggcaccaatgattgacaaccctgatttcaaggatgatccggatctctatgttttccccagcttgaagtatgttggtattgagttgtggcaggtgaaatcgggaacaatgtttgataacatcttagtcgctgatgatgtagagtatgccaagaaactagctgaagaaacatggggcaagcagaaggatgctgagaaggcagcatttgaggaggaagagaagaagaaagaggaagaggaatcgaaggatgagccagttgattccgatgctgaggacgacgatgatgatactgatgatggtgaaggaagtgagtcggattcaagcaaagatagtgctgaggaagatgcagtacaacatgatgagctataa

SEQ ID NO: 171 - protein, 417 aa, Gossypium raimondii
MAIPKRNPIFLSVIFVSLLAIASAKVFFEERFDEGWESRWVKSDWKKDENMAGEWNYTSGKWNGDPNDKGIQTSEDYRFYAISAEFPEVNNKDKTLVFQFSVKHEQKLDCGGGYMKLLSGDIDQKKFGGETPYSIMFGPDICGYSTKKVHAILTYNGTNHLIKKEVPCETDQLTHVYTFILRPDATYSILVDNVEKQTGSLYTDWDLLPPKKIKDPEAKKPEDWDDKEYIPDPEDKKPEGYDDIPKEIPDPDAKKPEDWDDEEDGEWTPSTIPNPEYKGPWNPKKIKNPNYKGKWKAPMIDNPDFKDDPDLYVFPSLKYVGIELWQVKSGTMFDNILVADDVEYAKKLAEETWGKQKDAEKAAFEEEEKKKEEEESKDEPVDSDAEDDDDDTDDGEGSESDSSKDSAEEDAVQHDEL

SEQ ID NO: 172 - DNA, 1266 bp, Gossypium raimondii
atgagtacaaccatggcgaatcacaaacggttccctaatttcgtatctcttattctcctctctctcgtcgccaccgcttctgctgaagttttcttcgaagaacgcttcgaagatggatgggaaagtcgttgggtaaaatctgactggaagaaagatgagaacatggctggggaatggaattacacttctggaaaatggaatggagatcctaatgacaaaggtattcaaactagtgaagactacaggttttatgctatttcagctgagttcccagaagttaacaacaagggaaagactctagtcttccaattttctgtgaagcacgagcagaagcttgactgtggtggtggctacatgaagttgctcagtggtgatgttgaccagaagaaatttggcggtgacaccccgtacagcatcatgtttggccctgatatttgcggctacagcaccaagaaagtacatgccattcttacatacaatgggacaaatcacttgatcaaaaaggaagttccttgcgagactgaccaactcactcatgtttatacattcattctccgtccagatgctacctacagcatccttattgataatgttgagaaacaaactggtagcctatacactgattgggatctcctcccaccaaagaagatcaaggatcctgaggccaagaagcctgaagattgggatgacaaggaatacatccctgatcctgaagacaaaaagccagagggttatgatgacattccaaaagagattcctgatcccgatgctaagaagcctgaagattgggatgatgaagaagatggtgaatggacaccctcaacaattcccaacccggagtacaagggcccatggaagccaaagaaaatcaagaaccctaactacaagggcaagtggaaggcaccaatgattgacaacccagatttcaaggatgatccagatctctatgttttcccccccttgaagtatgtcggtattgaattgtggcaggtgaaatctggaacaatgtttgataacatcttagttgctgatgatgtagagtatgccaagaaactagctgaagaaacatggggcaagcagaaggatgctgaaaaggcatcatttgaggaggcggagaaaaagagagaggaggaggaatcaaaggatgacccagttgattccgatgctgaggatgaagatgatgccgatgatactgaagggcacgagtctgattccgataccaaatcagacgatgaggacaaggaagatgcccatgatgagctttaa

SEQ ID NO: 173 - protein, 421 aa, Gossypium raimondii
MSTTMANHKRFPNFVSLILLSLVATASAEVFFEERFEDGWESRWVKSDWKKDENMAGEWNYTSGKWNGDPNDKGIQTSEDYRFYAISAEFPEVNNKGKTLVFQFSVKHEQKLDCGGGYMKLLSGDVDQKKFGGDTPYSIMFGPDICGYSTKKVHAILTYNGTNHLIKKEVPCETDQLTHVYTFILRPDATYSILIDNVEKQTGSLYTDWDLLPPKKIKDPEAKKPEDWDDKEYIPDPEDKKPEGYDDIPKEIPDPDAKKPEDWDDEEDGEWTPSTIPNPEYKGPWKPKKIKNPNYKGKWKAPMIDNPDFKDDPDLYVFPPLKYVGIELWQVKSGTMFDNILVADDVEYAKKLAEETWGKQKDAEKASFEEAEKKREEEESKDDPVDSDAEDEDDADDTEGHESDSDTKSDDEDKEDAHDEL

SEQ ID NO: 174 - DNA, 1302 bp, Hordeum vulgare
atggcggtcctcgcgaggtcggccgccgccgtggtcgcgctcgcgctctcgctgctcgtgtcggccgccgccggcgaggtcttcttccaggagaagttcgacgatggatgggaggaccggtgggtcaagtcggagtggaagaaggaggacaacacggccggcgagtggaaccacacctcgggcaaatggaacggcgacgccgacgacaaaggcattcagacgtcggaggactacaggttctacgccatctcggcgcagtacccggagttcagcagcaaggacaagaccctggtgctgcagttctccgtcaagcacgagcaggacctcgactgcggcggcggctacgtcaagctgctccccgccgacgtcgaccagaacaagttcggcggcgagaccccatacagcatcatgttcgggccggacatctgtgggtacgccaccaagaaggtgcacgcgatcctcaccaagaacggcaagaacaacctgatcaagaaggaggtgccctgcgagacggaccagctcacgcacgtctacaccttgatcctccggcccgacgccacgtacagcatcctcatcgacaacgtcgagaagcagtccggcagcgtctacgacgactgggacattcttcctgccaagaagaagagggatcctgatgccaagaagccagaggactgggaagacgaagagtaccttcctgaccccgaggacaagaagccagaggggtatgatgacattcccaaggaaatcactgatcctgatgcaacgaagcctgaggactgggatgatgaagaagatggtgaatggacagctccaaccatcccaaaccctgagtacaagggaccatggatccagaagaaattcaagaaccctaatttcaagggcaaatggaaggcacctttgatcgacaacccagaatacaaggatgacccttacatttacgcctttgacagcctcaagcacattggcatcgagctgtggcaggttaaatcgggaactctattcgacaacatcctgatcactgatgaccccgagtacgccaagaagtttgcagaggagacctggggcaagcacaaggatgctgagaaggccgcctttgatgaggccgagaagaaaaggcttgaggaggaatccgcaaactctaatgccgaagacaacgatgacacggctgatgaggacgaggatgttgatggcaaagctgccggcgccagcgatgaggggaaggggcagcaggtgtctgcggatgagaaggtagaggaaattagcaaggatgcttcttcttctgacaagaaggatgagctttag

SEQ ID NO: 175 - protein, 433 aa, Hordeum vulgare
MAVLARSAAAVVALALSLLVSAAAGEVFFQEKFDDGWEDRWVKSEWKKEDNTAGEWNHTSGKWNGDADDKGIQTSEDYRFYAISAQYPEFSSKDKTLVLQFSVKHEQDLDCGGGYVKLLPADVDQNKFGGETPYSIMFGPDICGYATKKVHAILTKNGKNNLIKKEVPCETDQLTHVYTLILRPDATYSILIDNVEKQSGSVYDDWDILPAKKKRDPDAKKPEDWEDEEYLPDPEDKKPEGYDDIPKEITDPDATKPEDWDDEEDGEWTAPTIPNPEYKGPWIQKKFKNPNFKGKWKAPLIDNPEYKDDPYIYAFDSLKHIGIELWQVKSGTLFDNILITDDPEYAKKFAEETWGKHKDAEKAAFDEAEKKRLEEESANSNAEDNDDTADEDEDVDGKAAGASDEGKGQQVSADEKVEEISKDASSSDKKDEL

SEQ ID NO: 176 - DNA, 1281 bp, Ipomoea nil
atggctgctcttagaagattaaattcggtgtttctctctctagccaagctatatctccttgttgctttcgtctccgcgggagtcatattcgaggagcgctttgacgatgggtgggagagtagatgggtcaagtctgactggaagaaggatgagaatatggctggggagtggaactacacctctggtaaatggaatggagaccctaacgacaaaggtattcagaccagtgaagactacaggttctatgccatctcagctgagttcccggagtttaataacaagggcaagaccctagttttccaattttcagttaagcatgagcaaaagcttgactgtggtggtggatacatgaaactgcttagtggtgacattgatcaaaagaaatttggcggtgacaccccttacagtatcatgtttggaccagacatctgtggctacagcaccaaaaaagtccatgctattcttacctataatgggacaaaccaattgatcaagaaggatgttccatgtgagactgaccagctaacccatgtctataccttcattctccgccctgatgctacatatagtattctcattgacaatgaggagaagcagtctggtagcttatacactgattggaatctgcttccaccaaagaaaattaaggatcctgaagccaagaaacctgaagattgggatgacaaggaatacattgatgatcctgaagataagaagccagagggttatgatgacatccccaaggagataccagatcttgatgctaagaagcctgaggattgggatgatgaagaggatggcgagtggactgccccaaccgttgccaaccctgagtacaagggtccatggacgccaaagaaaattaaaaaccccaactacaaggggaagtggaaggcacctatgattgataacccagacttcaaagatgatccagatctctatgttttcccaaatctgaagtatgttggcattgaattgtggcaggtgaaatctggtaccttgtttgacaatgttttggtaagtgatgatcccgagtatgcaaagaaattggctgaggagacatgggccaagaacaaggatggtgagaaggctgcatttgatgaggcagaaaagaagatagcagaggaggaatccaaggatgatccagctgactctgatgctgaggatgaagatgatgatgctgacgacacagatggtgatgatgctgactcaaaatccgaatcaaaacaagatgaaagcaagtctgagtccaaggaagatgatgcacatgatgaattgtga

SEQ ID NO: 177 - protein, 426 aa, Ipomoea nil
MAALRRLNSVFLSLAKLYLLVAFVSAGVIFEERFDDGWESRWVKSDWKKDENMAGEWNYTSGKWNGDPNDKGIQTSEDYRFYAISAEFPEFNNKGKTLVFQFSVKHEQKLDCGGGYMKLLSGDIDQKKFGGDTPYSIMFGPDICGYSTKKVHAILTYNGTNQLIKKDVPCETDQLTHVYTFILRPDATYSILIDNEEKQSGSLYTDWNLLPPKKIKDPEAKKPEDWDDKEYIDDPEDKKPEGYDDIPKEIPDLDAKKPEDWDDEEDGEWTAPTVANPEYKGPWTPKKIKNPNYKGKWKAPMIDNPDFKDDPDLYVFPNLKYVGIELWQVKSGTLFDNVLVSDDPEYAKKLAEETWAKNKDGEKAAFDEAEKKIAEEESKDDPADSDAEDEDDDADDTDGDDADSKSESKQDESKSESKEDDAHDEL

SEQ ID NO: 178 - DNA, 1305 bp, Lactuca sativa
atgagcaagaatggagctgaaaggtctgcacttcagcagaaattccaatttggagcacttgtgctggtgtttctctctatctgtactctttccttctcagagatcatcttcgaggagcgattcgatgatgggtggcagagccgatgggtgaagtctgattggaaaaaaaatgaaggaaaagctggatcatttaaacacacagctggatcatggtctggtgatccagatgataaaggcattcagacatcagttgatgcaagacatactgccatctctgcaaaaatcccagaattcaacaacaaaaatagaacactggtgttacaatactctataaaatttgaacaagacattgaatgtggtggtggttatatcaagcttatgtctggatatgttaaccaaaagaaattcggtggtgacactccttacagtgtaatgtttggaccagatttatgtggcacacagacaaagaagcttcatgttattgtttcctaccaagggcaaaattatccaatcaagaaggatttgcaatgcgaaacagacaagttaacacatttttacacttttgtccttaggcctgatgcaagttatagtattttaatagatggtagggagagagattctggaagcatgtatacagattgggatatccttccacctcgtaaaatcaaagatctcaaggccaaaaagcctgtggattgggaagaaagggaatatattgaggatcctgatcaagtaaagccagagggctatgatttcatcccaagagaaattcctgatcctaaagctaaaaagcctgatacttgggatgaagatgaagatggaatatggagagcaccaaagataccaaatccagcatacaaagggccatggaaaccaaagaaaattaaaaatccaaactacaaagggaaatggaagatcccttatatcgataatccagaattcgaagatgatcctgatttatatgtgctgaagccaattaaatatgtgggaattgaagtttggcaggtaaaagctggatctgtatttgacaatattttaatatgtgatgatccggagtatgcaaaagaagttgtcaaagaaattttcacccatagagagatcgaaaaagaagcattagaggaagctgagaaagcgaaaaaagcaagggaagaagaggaagcaaaaagagcaagagaggaaggtgaaaaaaggaagagagatcgagattatggtagaagacaccgagataaggagcgttatagggacagatacagggacagatatggaaagcgtcgtgattatgatgattatcatgatgagctatga

SEQ ID NO: 179 - protein, 434 aa, Lactuca sativa
MSKNGAERSALQQKFQFGALVLVFLSICTLSFSEIIFEERFDDGWQSRWVKSDWKKNEGKAGSFKHTAGSWSGDPDDKGIQTSVDARHTAISAKIPEFNNKNRTLVLQYSIKFEQDIECGGGYIKLMSGYVNQKKFGGDTPYSVMFGPDLCGTQTKKLHVIVSYQGQNYPIKKDLQCETDKLTHFYTFVLRPDASYSILIDGRERDSGSMYTDWDILPPRKIKDLKAKKPVDWEEREYIEDPDQVKPEGYDFIPREIPDPKAKKPDTWDEDEDGIWRAPKIPNPAYKGPWKPKKIKNPNYKGKWKIPYIDNPEFEDDPDLYVLKPIKYVGIEVWQVKAGSVFDNILICDDPEYAKEVVKEIFTHREIEKEALEEAEKAKKAREEEEAKRAREEGEKRKRDRDYGRRHRDKERYRDRYRDRYGKRRDYDDYHDEL

SEQ ID NO: 180 - DNA, 1239 bp, Lactuca sativa
atggcgacacggaaatttagcgggattgtatttctctctctactactgctcatttcagttgcttctgccaaggtgttcttcgaggagcgctttgaagatggatgggaaagccggtgggttaaatctgactggaagaaagaggacaacatggctggggagtggaattacacatctggtaaatggaacggagatgctaatgataaaggtatacaaacaagtgaagactacagattttatgccatatctgctgagtaccctgaattcagcaacaaggataaaacactagtcttccaattttctgtcaaacatgagcaaaagcttgattgtggtggtggatacatgaaattgcttagtggtgatgtggatcaaaagaaatttggtggcgataccccttacagtatcatgtttggacctgatatttgtgggtatgcaacaaagaaggttcatgcaattcttacatacaatggagaaaacaaattgatcaagaaagatgttccttgtgaaactgatcaacttacacatgtttatacctttattctacgccctgatgctacttacagtatcctcattgacaatgaagagaaacaaacaggaagtttgtactctgattgggatcttcttccagcaaaacagataaaggaccctgaggccaaaaagcctgaagattgggatgagaaggaatacatctctgatcctgaagataagaagcctgagggttatgatgacatcccaaaggagattccggatccagatgctaaaaagccagaagattgggatgatgaggaagatggtgaatggacaataccaactattccaaaccctgaatacaagggtccatggaaggcaaagaaaatcaagaaccccaactacaaagggaagtggaaggcacccatgattgacaacccagattttaaggatgaccctgatctctatgtattccccaagctgaagtatgttggcattgagttgtggcaggtaaaatctggaactttgtttgacaatgtattgatatgtgatgatcctgaatatgccaaacaactagtggaagaaacttgggccaaacaaaaagatgctgaaaaagctgcatttgaagaactagaaaagaaacgcgaggaagaggaatccaaggatgatcatgttgattctgatgctgatgatgagggcaatgatagtggtgatgaagccgaacccgaggaggaagaggaagcagatgataatgatatcaaggatgagctatag

SEQ ID NO: 181 - protein, 412 aa, Lactuca sativa
MATRKFSGIVFLSLLLLISVASAKVFFEERFEDGWESRWVKSDWKKEDNMAGEWNYTSGKWNGDANDKGIQTSEDYRFYAISAEYPEFSNKDKTLVFQFSVKHEQKLDCGGGYMKLLSGDVDQKKFGGDTPYSIMFGPDICGYATKKVHAILTYNGENKLIKKDVPCETDQLTHVYTFILRPDATYSILIDNEEKQTGSLYSDWDLLPAKQIKDPEAKKPEDWDEKEYISDPEDKKPEGYDDIPKEIPDPDAKKPEDWDDEEDGEWTIPTIPNPEYKGPWKAKKIKNPNYKGKWKAPMIDNPDFKDDPDLYVFPKLKYVGIELWQVKSGTLFDNVLICDDPEYAKQLVEETWAKQKDAEKAAFEELEKKREEEESKDDHVDSDADDEGNDSGDEAEPEEEEEADDNDIKDEL

SEQ ID NO: 182 - DNA, 1275 bp, Malus x domestica
atggcgaagcggcaaaagcatgatgagctgcttctgctagtattatcactctccttgctctccttttgctttcgttcttcgctttcggagatcattttcgaggagcgcttcgacgacgacggatggcgaagccgttgggtcaaatctgactggaaaagcagtgaaggtaaagcaggttcctttaaacatacagccggaaagtgggccggtgaccacgatgatagaggaattcagacatctaatgatgccaagcattttgccatatctgcaaagataccggagttcagcaacaagaacaggacgttggtcctccaatactcgatcaaatttgagcaggaaattgaatgtggcggcggttacataaagcttatgtctggatttgttaatcagaagaaattcggcggggacactccatacagtttaatgtttggccccgatatatgtggcacggacacaaagaagctccatgtcatactctcctaccaaggccagaattaccccatcaagaaggccttagagtgtgaaactgacaagttgactcatttctacacattcattcttcggcctgatgcaacttatagtgtcctaatagacaaccgagaaaaggattctggaagcatgtacacagattgggatattcttcctccaagaaagataaaagatgttactgcaaagaagccagcagactgggatcttagagaatacattgatgatcctaatcacatcaaacctgagggatatgattcaattccgagagaaattccagatccaaaagcaaaagagcccgaagactgggatgatgaagagaacggtctgtggaaagctccaaagataccaaatccagcttacaagggaccatggagacccaagaaaatcaagaaccctaattacaaggggaaatggaagattccttggattgataatccagagtttgaagatgatcctgatctctacgtgcttaagccaattaagtatgttggtatcgaagtttggcaggtaaaggctggttcagtttttgacaacgttttaatttgtgatgatccggattatgcaaaacaagtggtcgaggaagttttcgccaatagagaggtcgaaaaggatgcccttgaagaagcagaaaaaaggaggaaagcacaagaggaagaggaagctcaaagagcaagagaagagggtgaaaggaggagaagagatagggatcgaggtcaccgggacaggcatagagacagataccgaaggcaccgtcactgggatgactatgatcatgacgagctatga

SEQ ID NO: 183 - protein, 424 aa, Malus x domestica
MAKRQKHDELLLLVLSLSLLSFCFRSSLSEIIFEERFDDDGWRSRWVKSDWKSSEGKAGSFKHTAGKWAGDHDDRGIQTSNDAKHFAISAKIPEFSNKNRTLVLQYSIKFEQEIECGGGYIKLMSGFVNQKKFGGDTPYSLMFGPDICGTDTKKLHVILSYQGQNYPIKKALECETDKLTHFYTFILRPDATYSVLIDNREKDSGSMYTDWDILPPRKIKDVTAKKPADWDLREYIDDPNHIKPEGYDSIPREIPDPKAKEPEDWDDEENGLWKAPKIPNPAYKGPWRPKKIKNPNYKGKWKIPWIDNPEFEDDPDLYVLKPIKYVGIEVWQVKAGSVFDNVLICDDPDYAKQVVEEVFANREVEKDALEEAEKRRKAQEEEEAQRAREEGERRRRDRDRGHRDRHRDRYRRHRHWDDYDHDEL

SEQ ID NO: 184 - DNA, 1644 bp, Malus x domestica
atggcaggaacacggtggcgtcgaatcactgacctccttcttcttctgctgctgattggctgctctgcttcccagatccacgcttcttcagaatacgaagtcgattcgatcttttacgagccattttctgagtcgtttgaaggcagatggattgtttcttcgaaagatgagtaccaaggggtatggaaactgtccaagagtgagggacatgatgattacgggcttctggtaagtgagaaggcgaggaagtatgcagtggtgaaagagatggacaaggctgtgagccttgctgatggaactgttgtcctacagtttgaggtccggctccagaacgggcttgaatgtggcggtgcttacttgaagtacctccggccacaggaggctggatggaaagcggaggaatttgacaatgagtcgccatattctattatgtttggaccggacaaatgtggttccacaaacaaggttcatttcatttttaagcacaagaaccccaagagtggagagtatgttgagcaccatctcaaggaccctccatccgtgccctccgataagctgtctcatgtttacactgccatactgaaacctgataacgaagttaggattttgatagatggggaggagaagaagaaggcgaatttcctgtcgaataaagattttgagcctgcattgattccagccaagacaattcctgacccagaggatcaaaagccagaggattgggatgagcggctgaagattccagaccccaatgccgttaagcctgatgattgggacgaggatgcaccaatggaaattgaggacgaggatgctgtgaaacctgaagggtggttggatgatgagcctgaagagattgatgaccctgaggcgacaaggccagaaaattgggacgatgaagaggatggtgtatgggaaccgacaaagacggataaccccaagtgttcattggcacctggttgtggagaatggaagaagccaatgaaacataatcctgcttataaaggaaaatggagccctcctatgattgacaaccccagttacaagggcatctggaagcctcgagaaattccaaaccctgattacttcgagactgagaagcccaactttgagcccattgctgctattggcattgagatctggacaatgcaggacggaatattgtttgacaatatgctcatagctgatgatgagaaggttgctgaatctgttaggctaacaacgtggaagccgaagtttgaaactgagaaagagaaacagaaggctgaggaagaagctgcaggtctttccgatggactctcaagctaccagaagaaagtattcgaccttctttacaagatagcagatgtttctttcttggatgcatacaaacccaggatcattgaattgattgagaagggagaaaaacagcccaatattacaattggtgttatcgtctctgtcgtggttgttctcttgtcaattttctttaaaatcctgtttggtggcaagaaaccggcggtggtcactgttccagaaccaagcagggctgcggctgcacggacttcccatgatgaaggaagcagcggcgagagggaagatgagattgagaaagaagaagctgctgctcctcctccccgcaggcggtctgccagaagggaaacatga

SEQ ID NO: 185 - protein, 547 aa, Malus x domestica
MAGTRWRRITDLLLLLLLIGCSASQIHASSEYEVDSIFYEPFSESFEGRWIVSSKDEYQGVWKLSKSEGHDDYGLLVSEKARKYAVVKEMDKAVSLADGTVVLQFEVRLQNGLECGGAYLKYLRPQEAGWKAEEFDNESPYSIMFGPDKCGSTNKVHFIFKHKNPKSGEYVEHHLKDPPSVPSDKLSHVYTAILKPDNEVRILIDGEEKKKANFLSNKDFEPALIPAKTIPDPEDQKPEDWDERLKIPDPNAVKPDDWDEDAPMEIEDEDAVKPEGWLDDEPEEIDDPEATRPENWDDEEDGVWEPTKTDNPKCSLAPGCGEWKKPMKHNPAYKGKWSPPMIDNPSYKGIWKPREIPNPDYFETEKPNFEPIAAIGIEIWTMQDGILFDNMLIADDEKVAESVRLTTWKPKFETEKEKQKAEEEAAGLSDGLSSYQKKVFDLLYKIADVSFLDAYKPRIIELIEKGEKQPNITIGVIVSVVVVLLSIFFKILFGGKKPAVVTVPEPSRAAAARTSHDEGSSGEREDEIEKEEAAAPPPRRRSARRET

SEQ ID NO: 186 - DNA, 1626 bp, Medicago truncatula
atggtggaacgaaaggttatccctatcgctatcgcggtgctctttttcttcattgcttcctcttccttcgttcacgcttccgatgaagctgacgatgcgatcttctacgaatcgttcgatgaggattttgatagccgttggattgtatctgaaaaggaggaatacaatggtgtctggaagcattctaagagtgaggggcacgacgattttggacttcttgttagtgaaccagcaaggaagtacgccatagttaaagaacttgacgaacctgtcattcttaaggatggatcagttgttcttcagtttgagactcgcctacagaatggccttgaatgtggtggtgcatatatcaaatatcttcaaccccaggagagtggttggaaacccaagggatttgacaacgaatctccatattctgtcatgtttggtccagacaagtgtggggcaacaaataaggttcacttcatcttcaggcataagaatccaaagaccggaaagtatgttgaacaccatctcaagttccccccttctgtcccatctgacaaactatctcatgtgtacactgccattctaaagcctgataatgagttgagaattctagttgacggcgaggagaagaaaaaggctaacttcctatccgaggaggattttgagccttctcttatcccttccaagacaatccctgatcctgatgataacaaacccgaagactgggacgagagagccaagattcctgacccagaagctgtaaagccagaggactgggatgaggatgcacccatggaaattatcgatgaagaagctgagaaacctgaaggatggctggacgacgagccagaggaaatagatgacccggaggcaacaaaacctgaagattgggatgatgaggaggatggtgaatgggaagctcccaaaattgaaaacccaaagtgtgaaacagcccctggttgtggtgagtggaagaggccaacgaagaggaacccagcttataagggaaaatggagtgcccccttcattgataacccagcttataagggtatatggaagcctcaggagattccaaacccagagtactttgaacttgagaaacctgactttgagcctattgctgctattggtattgaaatttggacaatgcaggacggcattctatttgataatgttcttatagctaaggatgataagattgcagaatcctatcgtgaaactacatggaaacccaagtttaacattgagaaagagaagcagaaggctgaagaggaggcagcagctgagtcagagggtattgctggctaccagaagaaggcatttgacctcttgtacaagatcgcagacattcccttcctgagtggccagaaagataagattattgaaatcattgaaaagggggagaagcaaccaaatctgactattggaattcttgcatccgttgtggttgttttcgtaacaattttctttaggctcatattcggcgggaagaaacctgctaaggtggaggcgaaggtagagaagaagaccaacacagaacgcacagaaacttcccaagctggtggagagaatgaagacaacaaagagaaggaagaaacagccaatgctccacgtaggaggccaaagcgagacaattga

SEQ ID NO: 187 - protein, 541 aa, Medicago truncatula
MVERKVIPIAIAVLFFFIASSSFVHASDEADDAIFYESFDEDFDSRWIVSEKEEYNGVWKHSKSEGHDDFGLLVSEPARKYAIVKELDEPVILKDGSVVLQFETRLQNGLECGGAYIKYLQPQESGWKPKGFDNESPYSVMFGPDKCGATNKVHFIFRHKNPKTGKYVEHHLKFPPSVPSDKLSHVYTAILKPDNELRILVDGEEKKKANFLSEEDFEPSLIPSKTIPDPDDNKPEDWDERAKIPDPEAVKPEDWDEDAPMEIIDEEAEKPEGWLDDEPEEIDDPEATKPEDWDDEEDGEWEAPKIENPKCETAPGCGEWKRPTKRNPAYKGKWSAPFIDNPAYKGIWKPQEIPNPEYFELEKPDFEPIAAIGIEIWTMQDGILFDNVLIAKDDKIAESYRETTWKPKFNIEKEKQKAEEEAAAESEGIAGYQKKAFDLLYKIADIPFLSGQKDKIIEIIEKGEKQPNLTIGILASVVVVFVTIFFRLIFGGKKPAKVEAKVEKKTNTERTETSQAGGENEDNKEKEETANAPRRRPKRDN

SEQ ID NO: 188 - DNA, 1623 bp, Medicago truncatula
atgggagagcgaaagcgaattcctctcggaatttttgcagtgatcttcttcgtaatttgttcttcatcgttacaccttcttcgtgcttccgatgatgccgatgacgcgatcttctacgaatcatttgatgaggattttgatgatcgttggattgtttccgataaggatgaatataacggcatctggaagcattcaaagagtgaggggcatgaagattatgggcttcttgtcagtgagaaagcaagaaagtatgctgtagttaaagaacttgatgagcctgtgattcttaaggatgaatcagttgttcttcagtttgagactcgccttcagaatggcctcgaatgtggtggtgcatatctaaaatatcttcgaccacaggaagctggttggaaacccaaggaatttgacaacgattctccctattctatcatgtttggtcctgacaagtgtggggccacaaacaaggtgcacttcattttcaagcataagaatccgaagagtggggagtatgttgaacaccatctcaagtttcccccatctgttccttctgacaagctatctcacgtgtacactgctattttgaaacccgacaatgagttgcaaattttgattgatggggaacagaagaaaaaggcaaatttcttatcttctgaggattttgagccttcccttatccctcccaagacaatcccagatcctgaagataagaaacctgaggactgggacgagagagagaaaattccagacccaagtgcagtaaagcctgatgactgggatgaggatgcacccttggaaattcttgatgaagaaactgtgaaacctgaaggatggttagatgatgagcctgaggagatagatgacccagaggctacaaaaccagaagattgggacgatgaagaggatggtgaatgggaagcccctaagattactaacccaaattgtgaaacagcccctggttgtggtgagtggaaaaggccaatgaagaagaatccagcatacaagggaaaatggcatgcccccctaattaaaaatccagcttataagggtatatggaagcctcaggatattccaaaccctgattactttgagcttaaaaaacccgattttgagcctattgcagctattggtattgagatttggacaatgcaggatggcatattgtttgacaatattttgatcgctaaagatgataagattgcagcttcataccgggagactacatggaagcccaagtttactattgagaaagagaagcagaaggaagaagaaaaggacactgaatcaagtggtcttgcaagcatacataagaaggtatttgacctgttatacaagattgcagacattcccttcctgagtgcctacaagtttaaaatacatgatctcattgaaaagggtgaaacgcagccgaatctcacagttggaattcttgtagccgttgtggttattgtcttgacaattttccttcgtattgtatttggtgggaagaaaaagccagcaagagtggagaaaacaaacacacctgccgcagaaacttccactaaccaagacagtggagagaatgaagaaaacaaagaggaggaaacatcgaaggctccacgtcggagggtaaagcgagataattga

SEQ ID NO: 189 - protein, 540 aa, Medicago truncatula
MGERKRIPLGIFAVIFFVICSSSLHLLRASDDADDAIFYESFDEDFDDRWIVSDKDEYNGIWKHSKSEGHEDYGLLVSEKARKYAVVKELDEPVILKDESVVLQFETRLQNGLECGGAYLKYLRPQEAGWKPKEFDNDSPYSIMFGPDKCGATNKVHFIFKHKNPKSGEYVEHHLKFPPSVPSDKLSHVYTAILKPDNELQILIDGEQKKKANFLSSEDFEPSLIPPKTIPDPEDKKPEDWDEREKIPDPSAVKPDDWDEDAPLEILDEETVKPEGWLDDEPEEIDDPEATKPEDWDDEEDGEWEAPKITNPNCETAPGCGEWKRPMKKNPAYKGKWHAPLIKNPAYKGIWKPQDIPNPDYFELKKPDFEPIAAIGIEIWTMQDGILFDNILIAKDDKIAASYRETTWKPKFTIEKEKQKEEEKDTESSGLASIHKKVFDLLYKIADIPFLSAYKFKIHDLIEKGETQPNLTVGILVAVVVIVLTIFLRIVFGGKKKPARVEKTNTPAAETSTNQDSGENEENKEEETSKAPRRRVKRDN

SEQ ID NO: 190 - DNA, 1266 bp, Medicago truncatula
atggcggaaaatgcttcaactgaactgaagatgtttgtgttattctgtttgttgctaatacaagtttcactttctgaagtcatcttcgaagagcgttttgaagatggatggcgaagtcgttgggtaagatcagactggaaaagtagcgaaggcaaagccggttcgttcaagcacacggctgggaaatgggctggagatccagatgataaaggtatccaaacatctaatgatgccaaacattttgccatctctgcaaagataccagaattcagtaacaagaacagaacactagtcttccagtattctataaaatttgaacaagagattgagtgtggtggaggttatatgaagctcctctctggatttgttaatcagaaaaaatttggtggggatacgccgtatagtgtaatgtttggaccagatttatgtggaacagacacaaagaagctccatgtcatagtctcttaccaaggtcaaaattacccggtaaagaaggacctgcagtgtgaaactgacaagttaactcatttctacacattcattctcaggccagatgctacatacagtgttctggttgataatagagagcgagattctggaagcttgtatacagattgggatattctccctcctcgtaaaatcaaagatctcaaggcaaaaaagcctgcagactgggaagacagagaatacattgaagaccctaatgctgtcaaacctgagggatatgattcaatcccagcagaaattcctgatccaaaggctaaagagcctgatagttgggatgaagacgaagatggaatatggaagcggccgaagataccgaatccagcatacaaaggaccatggaaacgaaagaaaatcaagaatcctaactacaaagggaaatggaaaactccatggatagataatccagagtttgaagatgaccctgatctttatgtgcttaagcctatcaaatatgtcggcatagaagtttggcaggttaaaggtggttcagtatttgacaacattttgatttgcgatgatcctgaatatgcaaaacaagttgttgatgaagtgtttgccaacagggagattgaaaaagaggcttttgaggaagcagagaaagtaagaaaagcccaagaagaggaggaggctcaaagagcaagagaagacggtgaaaggcggagaaaagagagaggctatgatcgacaccgtgatagacatagagacagatatagaaagcatcgccgcgattacatggatgattatcatgatgaactatga

SEQ ID NO: 191 - protein, 421 aa, Medicago truncatula
MAENASTELKMFVLFCLLLIQVSLSEVIFEERFEDGWRSRWVRSDWKSSEGKAGSFKHTAGKWAGDPDDKGIQTSNDAKHFAISAKIPEFSNKNRTLVFQYSIKFEQEIECGGGYMKLLSGFVNQKKFGGDTPYSVMFGPDLCGTDTKKLHVIVSYQGQNYPVKKDLQCETDKLTHFYTFILRPDATYSVLVDNRERDSGSLYTDWDILPPRKIKDLKAKKPADWEDREYIEDPNAVKPEGYDSIPAEIPDPKAKEPDSWDEDEDGIWKRPKIPNPAYKGPWKRKKIKNPNYKGKWKTPWIDNPEFEDDPDLYVLKPIKYVGIEVWQVKGGSVFDNILICDDPEYAKQVVDEVFANREIEKEAFEEAEKVRKAQEEEEAQRAREDGERRRKERGYDRHRDRHRDRYRKHRRDYMDDYHDEL

SEQ ID NO: 192 - DNA, 1251 bp, Nicotiana tabacum
atggctactcaacgaagggcaaaccctagctctctccatctaattactgtattctctctgcttgtcgctgtcgtccccgctgaggtcttcttcgaggagagtttcaacgatggttgggaaagcaggtgggtgaaatctgaatggaagaaagatgaaaacatggctggagagtggaatcacacatctggcaagtggaatggagacgctaatgacaaaggtatccaaaccagtgaagactacaggttctttgccatttcagctgagttccctgaatttagcaacaagggaaaaaacttagtgttccagttctctgtgaagcatgagcagaagcttgactgtggtggtgggtacatgaagttgcttagtggggacgttgaccaaaagaaattcggtggtgacactccctacagcatcatgtttggcccagacatctgtggctacagcaccaagaaggtccatgctattctcacttataatgacacaaaccacttgatcaagaaggaagtaccttgtgagactgatcaactgacccatgtctacactttcatcctccgccctgatgctacatacagcattctcattgataatgtggagaaacagtctggtagcttgtattctgactgggaccttctcccaccagagaaaatcaaggatccaagtgccaagaagcctgaagattgggatgagaaggaattcattgatgatcctgaggataagaagccagaggactatgatgacattccagaggagataactgatcccgatgccaagaagccagaggactgggatgatgaagaagatggtgaatggacagccccaaccattcccaacccggagtacaagggcccatggaagccaaagaaaataaagaaccccaactacaaggggaagtggaaggctcctttgattgacaacccagacttcaaggatgacccagatctctatgttttcccaaatctgaagtatgtgggagttgaactgtggcaagtgaaatctggaaccttgtttgacaatattgtcatatgcgacgatccagagtatgccaaggcaattgctgaagaaacatggggaaaacagaaggatgcggaaaaggctgcttttgaggaagcagaaaagaagagagaggaagaggaatcaaaggctgctccagctgattctgatgccgaggaagatgatgatgccgatgatgatgctgatgatgctgatgacaagttggagtccaaggatgatgaagcgcacgatgaactgtaa

SEQ ID NO: 193 - protein, 416 aa, Nicotiana tabacum
MATQRRANPSSLHLITVFSLLVAVVPAEVFFEESFNDGWESRWVKSEWKKDENMAGEWNHTSGKWNGDANDKGIQTSEDYRFFAISAEFPEFSNKGKNLVFQFSVKHEQKLDCGGGYMKLLSGDVDQKKFGGDTPYSIMFGPDICGYSTKKVHAILTYNDTNHLIKKEVPCETDQLTHVYTFILRPDATYSILIDNVEKQSGSLYSDWDLLPPEKIKDPSAKKPEDWDEKEFIDDPEDKKPEDYDDIPEEITDPDAKKPEDWDDEEDGEWTAPTIPNPEYKGPWKPKKIKNPNYKGKWKAPLIDNPDFKDDPDLYVFPNLKYVGVELWQVKSGTLFDNIVICDDPEYAKAIAEETWGKQKDAEKAAFEEAEKKREEEESKAAPADSDAEEDDDADDDADDADDKLESKDDEAHDEL

SEQ ID NO: 194 - DNA, 1344 bp, Ocimum basilicum
atgaatagacgaggtcttctgctcatactcatctcccaccaagtcatccattactcggcagccatggcgatagtacagagaagatcgctgatcacaactcttctatctgtagcgttgactctctccctccttctagctgttgcctctgccgctgtattctttgaggagcgatttgatgatggatgggaaagtcggtgggtgaaatctgactggaagaaagatgagaacatggctggagagtggaattacacctccgggaagtggaacggaaaccctgatgacaaaggtatccagaccagtgaagactacagattctatgccatctctgctgaattccctgaatttagcaacaaggataagaccctagttttccaattttctgtcaagcacgagcagaaactcgactgtggtggtggatacatgaaattgctcagtggtgatattgaccagaagaaatttggtggtgacactccatacagcatcatgtttgggccagacatctgtggatacaccaccaaaaaggttcatgctattcttacatacaacgggacaaacaacttgatcaagaaggatgttccatgtgagactgaccaactgtctcatgtgtatactttcatcctcaaacctgatgcaacctacacaattctcattgacaatgtggagaagcagtcagggagcttgtactctgactgggatctattgcctccaaagcagatcaaggacccagaggccaagaagcctgaagattgggatgatagggaaaatattcctgatcctgaggacaagaagccagagggttatgatgatatcccgaaggaaattcctgattctgaggccaaaaagcctgaggactgggatgatgaggaagatggtgaatggactgctccaaccattcccaaccccgagtacaaggggccatggaaggcaaagaaaattaagaaccccaactacaagggcaagtggaaggcaccattgattgataacccagagttcaaggatgacccagaactatatgttttcccgaagttgaagtatgtaggcatcgagttgtggcaggtgaaatctggaactttgtttgacaatgtccttatagccgatgaccctgaatatgcgaagaaggtagcagaagaaacatggggcaagcaaaaggatgctgagaaagctgctttcgaagaagccgaaaagaagagagaggaggaggaatcaaagaatgatggagttgattcagatgctgatgatggagaggagtctgatgctgaagctgatgacgccgatgattccaagatagacccgaacgaagaccctgtagcctctgtcgatgacgacgtgcatgacgaattgtag

SEQ ID NO: 195 - protein, 447 aa, Ocimum basilicum
MNRRGLLLILISHQVIHYSAAMAIVQRRSLITTLLSVALTLSLLLAVASAAVFFEERFDDGWESRWVKSDWKKDENMAGEWNYTSGKWNGNPDDKGIQTSEDYRFYAISAEFPEFSNKDKTLVFQFSVKHEQKLDCGGGYMKLLSGDIDQKKFGGDTPYSIMFGPDICGYTTKKVHAILTYNGTNNLIKKDVPCETDQLSHVYTFILKPDATYTILIDNVEKQSGSLYSDWDLLPPKQIKDPEAKKPEDWDDRENIPDPEDKKPEGYDDIPKEIPDSEAKKPEDWDDEEDGEWTAPTIPNPEYKGPWKAKKIKNPNYKGKWKAPLIDNPEFKDDPELYVFPKLKYVGIELWQVKSGTLFDNVLIADDPEYAKKVAEETWGKQKDAEKAAFEEAEKKREEEESKNDGVDSDADDGEESDAEADDADDSKIDPNEDPVASVDDDVHDEL

SEQ ID NO: 196 - DNA, 1329 bp, Oryza sativa
atggcgatccccagaaggtcggcggccgccgtcgctgccgtggtggcgctcgcgtccgtggccgctgtcgccggcgaggtcttcttccaggagaagttcgacgatggatgggaggatcggtgggtcaaatctgagtggaagaaggatgacaacagggccggcgaatggaaccacacctccggcaagtggtacggcgacgccgacgacaagggtatccagacgtcagaggactacagattctacgccatttcggccaagtaccctgagttcagcagcaaggacaagaccctcgtgctgcagttctcggtgaagcacgagcagaagctcgactgcggcggcggctacgtgaaattgctcggtggcgacgttgaccagaagaagtttggtggcgagacgccgtacagcatcatgtttggaccagatatctgcgggtatgccaccaagaaggttcacgctatccttacaaagaacggcaagaaccatctaatcaagaaggacgtgccatgcaagaccgatcaactgacgcacgtctacaccttgatcatccgtcctgacgccaaatacagcattctgatcgataacactgagaagcaaactggaagcatctatgatgattggaacattattcctccaaagaataagagggatcctgaagccaagaagccagaagactgggacgacaatgaatacattcctgatcctgaggacaagaagcctgagggctatgatgatatccctaaggaaattactgacccagaagcaactaagcctgaggactgggatgatgaggaagatggagaatggacagctccaaccattccaaaccctgagtacaagggaccatggaaccaaaagaaacttaagaaccctaattacaagggcaaatggaaggcaccattgatccccaacccagattacaaggatgatccttacatctacgcttttgatagtttgaaccacattggcattgagctgtggcaggttaagtcgggaactttgtttgacaacattcttatcactgatgaccctgagtatgccaagaaatttgcagaagaaacctgggccaagcataaagatgctgagaaagccgcctttgatgaagctgagaagaagaggcttgaggaggaatctgcaaactctaaaatcgacgacagcgacgacgacgctagtgatgatgaggatgaggcggacgatgacaaggctgatgtcgttgctgagcagaccaaggacaagggtgatgagaaaccgcaggacatcaaggtctctgctgatgagaagccaaagagcagcaaggatgattcttccgctgcgaagaaggacgagctttag

SEQ ID NO: 197 - protein, 442 aa, Oryza sativa
MAIPRRSAAAVAAVVALASVAAVAGEVFFQEKFDDGWEDRWVKSEWKKDDNRAGEWNHTSGKWYGDADDKGIQTSEDYRFYAISAKYPEFSSKDKTLVLQFSVKHEQKLDCGGGYVKLLGGDVDQKKFGGETPYSIMFGPDICGYATKKVHAILTKNGKNHLIKKDVPCKTDQLTHVYTLIIRPDAKYSILIDNTEKQTGSIYDDWNIIPPKNKRDPEAKKPEDWDDNEYIPDPEDKKPEGYDDIPKEITDPEATKPEDWDDEEDGEWTAPTIPNPEYKGPWNQKKLKNPNYKGKWKAPLIPNPDYKDDPYIYAFDSLNHIGIELWQVKSGTLFDNILITDDPEYAKKFAEETWAKHKDAEKAAFDEAEKKRLEEESANSKIDDSDDDASDDEDEADDDKADVVAEQTKDKGDEKPQDIKVSADEKPKSSKDDSSAAKKDEL

SEQ ID NO: 198 - DNA, 1614 bp, Oryza sativa
atggtgggtgggcgcgcgctcctgccgctgcttctgctctccgcgctgctcgtccagatccgcgcctccgatccgctgttctatgagccgttcgacgagagcttcgaggggaggtgggttctctccgggaaggacgactacaaaggtgtatggaagcacgaaaagagtgatggacatgaagactatggcctgcttgttagtgagaaggccaagaaatatgccataatcaaggagcttgatgagcctgttactttgaaggatgggactgttgtcctgcagtttgaagtgaggcttcagaatggccttgagtgtggaggtgcatatcttaagtacattcgtcctcaggatgctgcatgggatgccaaggagtttgataatgagactccttacactattatgtttggtcctgacaaatgtggatcaactaacaaggtgcatttcatccttaagcacaagaaccccaagactggcaagtatgttgaacaccacctcaagttcccaccttctgtcccatatgataagctctctcatgtctacacggctatcttgaagcctgataatgaggtgagaattttggttgatggggaagagaagaagaaggcaaacttcctttctgctgatgattttgagccatcacttatcccatccaagaccattcctgatcctgatgacaaaaagccagaagactgggatgagagagctaaaatccctgatccagatgctgtgaagcctgatgactgggatgaggatgcccccatggaaattgaggacgaagaggccacaaagccagaggggtggctggatgatgagccagaggaaattgatgatccggaggctaacaagcctgaagactgggatgatgaggaggatggagaatgggaagcaccaaagattgacaaccccaagtgtgaagaggctcctggttgtggtgagtggaagaggccgatgaagcagaaccctgcttacaagggcaagtggcatgcgcctcttatcgacaaccccaactacaaaggaatctggaagccccaagagatccccaaccctgagtacttcgagcttgacaagcctgactctgatccgattgccgctattgggattgagatctggacgatgcaagatggcatcctgtttgacaacattttgatcgctgatgatgagaaggttgccacttctatcctggagaagtcttggaagcccaagtacgaagtagagaaggagaaggagaaggctgaggaggcagcagcggcagcaggtgatggtctttctgagttccagaagaagatctttgacgttctgtacaaactcgctgacattccattcttggaaccctacaagactaagatcattgatgtaattgagaagggagagaagcagcccaacatcaccattggaattctggtctccatcgttgtcgtctttgtgactgtgctcttcaggatcctgttcggcggcaagaagccagcggctcctgtgaagcccgtagccgaggtcaaaaaaccaaagtctaccgagtccgaagcagctggaagcagcggtggcaaggaggacgagaaggaagaggaagagaaggatggagctgctgccccacgccggaggtcccgaagggagacatga

SEQ ID NO: 199 - protein, 537 aa, Oryza sativa
MVGGRALLPLLLLSALLVQIRASDPLFYEPFDESFEGRWVLSGKDDYKGVWKHEKSDGHEDYGLLVSEKAKKYAIIKELDEPVTLKDGTVVLQFEVRLQNGLECGGAYLKYIRPQDAAWDAKEFDNETPYTIMFGPDKCGSTNKVHFILKHKNPKTGKYVEHHLKFPPSVPYDKLSHVYTAILKPDNEVRILVDGEEKKKANFLSADDFEPSLIPSKTIPDPDDKKPEDWDERAKIPDPDAVKPDDWDEDAPMEIEDEEATKPEGWLDDEPEEIDDPEANKPEDWDDEEDGEWEAPKIDNPKCEEAPGCGEWKRPMKQNPAYKGKWHAPLIDNPNYKGIWKPQEIPNPEYFELDKPDSDPIAAIGIEIWTMQDGILFDNILIADDEKVATSILEKSWKPKYEVEKEKEKAEEAAAAAGDGLSEFQKKIFDVLYKLADIPFLEPYKTKIIDVIEKGEKQPNITIGILVSIVVVFVTVLFRILFGGKKPAAPVKPVAEVKKPKSTESEAAGSSGGKEDEKEEEEKDGAAAPRRRSRRET

SEQ ID NO: 200 - DNA, 1203 bp, Physcomitrella patens
atggccgctcctccagccctctttcctgcgttgctcttggtcttgtcggtcgtttgtcttgctgcatgcgaggtcatcttccaagagcgtttcgatgacggttgggagagtcgctggattcaatcaaactggaagaaaagtcaaggccttaatggaaactttgtgcacactcctggcaagtggtatggagacgaaaatgacaaaggaattcaaacatcaactgactcgcgatattatgctatctctgcacaaattcctgagttcaacaacaagggcaagacgctagtactccaataccaagtcaaacacgaacaaaacatcgaatgtgggggtggctacgtgaagttaatgagtggtcaggtggaccaaaagacttttggtggtgacactccttacagtatcatgtttggacctgatatttgtggttctcaaaccaaaaaaatccatgccatcatcttgtacaagagtaaaaaccatcaaatgaaaaagacagtggagtgcgagactgacaagctctcccacgtgtatacatttatcatccgaccggacgctacttacagtattttggttgataacaaagagaaggaatctggtagcttgtacaaagattgggacttgttgccaccccgaaagattaaagacctcagtgctaagaagccggaagactgggatgacaacgaattcattccagaccccgaggaccataaacccgaggggtatgactcaataccaaaggaaatcccagatcttgatgctaagaagccagaagagtgggatgatgaaagtgacggagaatgggaagctccattaattccaaacccagaattcaaagggccgtggacgccaaaggaaattaagaaccctaattacaacggcaaatggaaggctccacttattagtaacccagaattcgaagaggatcctgatctgtatgttttgcctccattaaagtatttcggtatggagctatggcaggtaaaggcagggtcggtttttgacaacattctagtaacagacgatccagagtatgccaaaaagtttgctgaggagacttggggaaatatcaaggaaggtgagaaggaaatgtttgacgagctcgagaacaagaaccgcgaagaacagaagatcgacgacaatgatccgaatgaagaaaaggacgattatgacgaggatgacgatgatgatgatcatgatgaactttga

SEQ ID NO: 201 - protein, 400 aa, Physcomitrella patens
MAAPPALFPALLLVLSVVCLAACEVIFQERFDDGWESRWIQSNWKKSQGLNGNFVHTPGKWYGDENDKGIQTSTDSRYYAISAQIPEFNNKGKTLVLQYQVKHEQNIECGGGYVKLMSGQVDQKTFGGDTPYSIMFGPDICGSQTKKIHAIILYKSKNHQMKKTVECETDKLSHVYTFIIRPDATYSILVDNKEKESGSLYKDWDLLPPRKIKDLSAKKPEDWDDNEFIPDPEDHKPEGYDSIPKEIPDLDAKKPEEWDDESDGEWEAPLIPNPEFKGPWTPKEIKNPNYNGKWKAPLISNPEFEEDPDLYVLPPLKYFGMELWQVKAGSVFDNILVTDDPEYAKKFAEETWGNIKEGEKEMFDELENKNREEQKIDDNDPNEEKDDYDEDDDDDDHDEL

SEQ ID NO: 202 - DNA, 1647 bp, Physcomitrella patens
atgctgtccatggcgtcgcgtggaatggctggatttggattgctggtgctctttgcctgcttcgccattgccgcttcgctctctgacacggtgttttatgagaacttcgacgaggacttcgaagggcgatgggtcgtctctcaaaatagcgactacggaggtacatggaagcatgccaagagcgacggtcacgatgattacggactgttggtcagcgagaaagctaagaagtatggcatagccgtcgatttgcctgagaaggttgatccgaaggatggatctcttgttcttcagtacgacctgaggcttcagaatggacttgagtgcggtggtgcctacttgaagtttcttcaacctcaggaagcagggtggacggccaacgacttcaacaacgagtccccctactccataatgtttggtccggacaagtgtggggccactaacaaggttcacttcatcttccggcacaagaacccaaccaccgggaaatacgtggagcaccatttgaagaatccccctgttcccgctggcgacaagctgtctcatgtctacacagccattatctatcctaacaacactctcagaatcttgattgatggcgaggagaagaaaacggctgatctgctgtctgaagagtttgaaccaacagtcatccccgcaaagacgattcccgacccagaagataagaagcctgaggattgggacgatcgtgccaaaattcccgaccctgatgccaccaagcctgatgactgggatgaggacgctcctagagagatcgaagacgaggaagccgagaagcctgagggatggttggatgacgagcctgatgaagttgacgatcccgaagctgtgaagcccgaggactgggacgatgaggaagatggcgaatgggaacctcccaagatcaccaaccccaaatgtgaggagggtcctggttgtggtgagtggaagcgtcccttgaaggcaaaccctgcttacaagggcaagtggagggcaccaatgatcgacaacccagcttaccagggcatctgggcacctaggcagattcccaaccctgagtacttcgagctggaaaagctcaacttggaagcagtggctgccattggtatcgagatctggaccatgcaggatggtatcttcttcgacaacattctagtcgcacacgacgaagcggtcgctgaggagtacaggaagaccacttgggaaccaaagcacacggtcgagaaggagaaagaggcagctgaggcgaagaagtctgacgataaggctgataagaccagcgtagacaacatcaaggagaaggtcttcgaggctctgaataagattgcagaggttccattccttgccaagtacaaggagcagatcgatgctgtacttgacaaggctgagagcaatcccaacgtcacccttggtgttttggcaaccatccccgtgcttctcttcacgatgttgttcagtctttgcctcggaaagaagaaatcaccacccgctgtcacgactggggccattaagaaggaggatcttgtgaccgccgatgatgtgtccgtgcctaagggggaacaagtagaggaagcagagcaagagcaagcaggagagatagagaaggagggggttagtgcccgccgcaggccccgcagagagacatag

SEQ ID NO: 203 - protein, 548 aa, Physcomitrella patens
MLSMASRGMAGFGLLVLFACFAIAASLSDTVFYENFDEDFEGRWVVSQNSDYGGTWKHAKSDGHDDYGLLVSEKAKKYGIAVDLPEKVDPKDGSLVLQYDLRLQNGLECGGAYLKFLQPQEAGWTANDFNNESPYSIMFGPDKCGATNKVHFIFRHKNPTTGKYVEHHLKNPPVPAGDKLSHVYTAIIYPNNTLRILIDGEEKKTADLLSEEFEPTVIPAKTIPDPEDKKPEDWDDRAKIPDPDATKPDDWDEDAPREIEDEEAEKPEGWLDDEPDEVDDPEAVKPEDWDDEEDGEWEPPKITNPKCEEGPGCGEWKRPLKANPAYKGKWRAPMIDNPAYQGIWAPRQIPNPEYFELEKLNLEAVAAIGIEIWTMQDGIFFDNILVAHDEAVAEEYRKTTWEPKHTVEKEKEAAEAKKSDDKADKTSVDNIKEKVFEALNKIAEVPFLAKYKEQIDAVLDKAESNPNVTLGVLATIPVLLFTMLFSLCLGKKKSPPAVTTGAIKKEDLVTADDVSVPKGEQVEEAEQEQAGEIEKEGVSARRRPRRET

SEQ ID NO: 204 - DNA, 1284 bp, Pinus pinaster
atggcaggccgacgatcgcttttgtacgctgtgttgctgctgctgttcgttactttcgtctccgccgaagtctttttcgaggagcgtttcgatgatagctgggaaagtcgttgggtgcaatctgattggaaaaaggatgaaagcttggctggagattgggtgcacacagcagggaaatggaacggggatccaaatgacaagggcatccaaacacatacagactatagattttttgccatctcagctgcgtaccctgaatttagcaacaaggataaaacccttgttcttcagttttctgtcaagcatgaacaaaaacttgattgtggtggtggctatgtaaagttgttaagtggtgaagttgaccagaagaatttcagtggagagacaccttatagtattatgtttggaccagacatttgcggttacagcactaagaaggttcataccattctgtcatataaagggaagaaccatcctatcaaaaaagatgtcccttgtgaaacagatcagcttactcatgtttatacattcattcttcgaccggatgctacatatagcatcctcattgacaacaaggacaaacagtctgggagtttgtacaaggattgggacttgttgccatcaaaaacaatcaaggaccctaatgccaaaaagcctgaggattgggatgataaggaatacattcctgatccagaagacaagaaacctgagggatatgatgacattccaaaggaaatacctgatccagatgccactaagccagaggattggaatgacgaggaggatggtgagtggacagctccaactattgcaaatccagaatataaaggaccgtggaatcctaagaaaattaagaatcctaactacaagggtaaatggaaggctccaataattgacaatcctgatttcaaggatgatccagagctctatgtttttcccaatctcaaatatctaggaatcgagttatggcaggtcaagtcaggaacattatttgataacattttaatctctgatgatcctgaatatgccaagaagttagcagaggaaacatgggccaaacacaaggatgccgaaaaggaagcctttgacgaggcagagaaaaagaaagaagaggaggagaaagagaaagagcctgatgatgaggatacagatgaggaggaggaaaaatctgatgacgaggatgcagatgaattagacaatgaacacaaagaagcagacaagaaagaacatgaattagacagtgaacacaaagaagaggacaagaaagaacatgatgagctatag

SEQ ID NO: 205 - protein, 427 aa, Pinus pinaster
MAGRRSLLYAVLLLLFVTFVSAEVFFEERFDDSWESRWVQSDWKKDESLAGDWVHTAGKWNGDPNDKGIQTHTDYRFFAISAAYPEFSNKDKTLVLQFSVKHEQKLDCGGGYVKLLSGEVDQKNFSGETPYSIMFGPDICGYSTKKVHTILSYKGKNHPIKKDVPCETDQLTHVYTFILRPDATYSILIDNKDKQSGSLYKDWDLLPSKTIKDPNAKKPEDWDDKEYIPDPEDKKPEGYDDIPKEIPDPDATKPEDWNDEEDGEWTAPTIANPEYKGPWNPKKIKNPNYKGKWKAPIIDNPDFKDDPELYVFPNLKYLGIELWQVKSGTLFDNILISDDPEYAKKLAEETWAKHKDAEKEAFDEAEKKKEEEEKEKEPDDEDTDEEEEKSDDEDADELDNEHKEADKKEHELDSEHKEEDKKEHDEL

SEQ ID NO: 206 - DNA, 1656 bp, Pisum sativum
atggtggatcgtaaggaaatccctttggctatggggctattggcggtgctccttttcttcgttgcttcttcctcttcgtttcatctcgttcgcgcttctgatgaagtagatgacgcgatcttttatgaatcgttcgatgaggattttgataaccgatggatcgtatctggcaaggaggaatacaatggtgtatggaagcattcaaagagtgaagggcatgatgattttggacttcttgtcagtgaaccagcaaggaagtatgctatagttaaagagcttgatgcacctgtcagtcttaaggacggaacagttgttcttcagtttgagactcgccttcaaaatggacttgaatgtggtggtgcatatattaaatatcttcaaactcaggagagtggttggaagcccaaggggtttgacaatgaatctggttattctatcatgtttggtccagataggtgtggggcaaccaacaaggtgcattttatcttcaggcataagaatcccaagactgggaagcatgttgaacaccacctcaagtttcctccttctgtcccgtctgacaaactatctcatgtgtacactgctgttctaaaggatgataatgaagtgagcattttaattgatggcgaggaaaagaaaaaggcaaatttcttatcttctgaagattttgagcctgcccttatcccttccaagacaatcccagaccccgatgataagaaacccgaggactgggacgagagagccaaaattcctgacccagaagctgtaaagccagaggactgggatgaggatgcacctagggaaattattgatgaagaagctgagaaacctgaaccatggttggatcatgagccagaagtagatgacccagaggcaaaacctgaagattgggatgatgaggaggatggtgaatgggaagctcccaaaatcgaaaacccaaagtgtgaagcagcccctggttgtggtgaatggaagaggccaaccaagagcaacccagcttataagggaaaatggagtgccccctacattgataaccccaattataagggtatttggaagcctcaggagattccaaacccagagtactttgaacttgagaaaccagactttgagcctattgctgctattggcattgaaatttggacaatgcaagatggcatcctatttgataatgttctcatagctaaagatgataagattgccgagtcctatagggaaactacttggaaacccaagtttaacattgagaaagagaaacaaaaacacgaagaggaggcagcggctgcagctgcggcacgctctgagtcagagggtattgctggcatccagaagaaggcattcgatctcttgtacaagatcgcagacattgccttcctaagtggccaaaaggagaagattattgaaatcattgaaaagggggagaagcaaccgaatctgactattggaattattgtatctgttgtgattgtctttgtgtcaatcttcttcagactcatattcggtggaaagaaacctgctaatgtggaggctaatgttgagaagaagaagaccaacacagaaactaccagtaaacaagatggcggagagaaggaagataacaaagaaaaggaggaaacagccaaccctccacgtcggaggccaaagagagacaattga

SEQ ID NO: 207 - protein, 551 aa, Pisum sativum
MVDRKEIPLAMGLLAVLLFFVASSSSFHLVRASDEVDDAIFYESFDEDFDNRWIVSGKEEYNGVWKHSKSEGHDDFGLLVSEPARKYAIVKELDAPVSLKDGTVVLQFETRLQNGLECGGAYIKYLQTQESGWKPKGFDNESGYSIMFGPDRCGATNKVHFIFRHKNPKTGKHVEHHLKFPPSVPSDKLSHVYTAVLKDDNEVSILIDGEEKKKANFLSSEDFEPALIPSKTIPDPDDKKPEDWDERAKIPDPEAVKPEDWDEDAPREIIDEEAEKPEPWLDHEPEVDDPEAKPEDWDDEEDGEWEAPKIENPKCEAAPGCGEWKRPTKSNPAYKGKWSAPYIDNPNYKGIWKPQEIPNPEYFELEKPDFEPIAAIGIEIWTMQDGILFDNVLIAKDDKIAESYRETTWKPKFNIEKEKQKHEEEAAAAAAARSESEGIAGIQKKAFDLLYKIADIAFLSGQKEKIIEIIEKGEKQPNLTIGIIVSVVIVFVSIFFRLIFGGKKPANVEANVEKKKTNTETTSKQDGGEKEDNKEKEETANPPRRRPKRDN

SEQ ID NO: 208 - DNA, 1257 bp, Picea sitchensis
atgagaatggcaggtcgacgatcgcttttgtacgctgggttcctgctgctgttcgcttccttcgtctcggccgaagtccttttcgaggagcgtttcgacgatagctggaaaagtcgttgggtgcaatctgattggaaaaaggatgaaagcttggctggagattgggtgcacacggcagggaaatggaatggggatccaaatgacaaggggatccaaacccatacagactatagattttttgccatctcagctgcattccctgagtttagcaacaaggataagacccttgttcttcaattttctgtcaagcatgaacaaaaacttgattgtggtggtggctatgtaaagttgttaagtggtgaaattgaccagaaaaatttcactggagagacgccttatagtatcatgtttggaccagacatttgtggttacagcactaaaaaagttcatgtcattctgtcaaacaaagggcagaaccatcctatcaaaaaggatgttccttgtgaaacagatcagcttactcatgtttatactttcattcttcgaccggatgctacatatagcatcctcattgataacaaggacaaacagtctgggagtttgtataaggattgggacttattgccaccaaaaacaatcaaggaccctgatgccaaaaaacctgaggattgggatgataaggaatacattcctgatccagaagacaagaaacctgagggatatgatgacattccaaaggaaatacctgatccagatgccactaagccagaagattggaatgacgaggaggatggtgagtggacagctccaactattgcaaatccagaatataaaggaccctggaagcctaagaaaattaagaatccaaacttcaagggcaaatggaaggctccaatgattgacaatcctgatttcaaggatgatccagagctctatgtttttcccaatctcaaatatctaggaattgagttatggcaggtcaagtcaggaacattatttgataacattttaatctgtgatgatcctgaatatgccgggaagttagcagaggaaacatgggccaaacacaaggatgctgaaaaacaagcctttgacgaggcagagaaaaagaaagaagaggaggagaaagagaaagattctgatgatgaggaggatacagatgagaaagaggaaaagtctgatgatgaggaggatactgaatcagacgatgaacacaaagaagaagaggaggacaaggaagaacatgatgagctatag

SEQ ID NO: 209 - protein, 418 aa, Picea sitchensis
MRMAGRRSLLYAGFLLLFASFVSAEVLFEERFDDSWKSRWVQSDWKKDESLAGDWVHTAGKWNGDPNDKGIQTHTDYRFFAISAAFPEFSNKDKTLVLQFSVKHEQKLDCGGGYVKLLSGEIDQKNFTGETPYSIMFGPDICGYSTKKVHVILSNKGQNHPIKKDVPCETDQLTHVYTFILRPDATYSILIDNKDKQSGSLYKDWDLLPPKTIKDPDAKKPEDWDDKEYIPDPEDKKPEGYDDIPKEIPDPDATKPEDWNDEEDGEWTAPTIANPEYKGPWKPKKIKNPNFKGKWKAPMIDNPDFKDDPELYVFPNLKYLGIELWQVKSGTLFDNILICDDPEYAGKLAEETWAKHKDAEKQAFDEAEKKKEEEEKEKDSDDEEDTDEKEEKSDDEEDTESDDEHKEEEEDKEEHDEL

SEQ ID NO: 210 - DNA, 1275 bp, Populus trichocarpa
atggagaagaagctaagactacatgtcgttcaagccttaaagctactatttttgcttttcactatccactgtctcttcctcttccctgtcactctctctgaaatcttctttgaagaacgttttcaagatgggtggaaagatagatgggttttatcagactggaaaagaagtgaaggcaaagctggtacttttaagtacacagcagggaaatggcctggcgatccagatgataaaggtattcaaacatataatgatgcaaagcattttgctatatctgcaaagatatcacctgagtttagtaacaagaatagaactttagtagttcagtattctattaagtttgagcaagaaattgagtgtggtggtgggtatattaagctgttttctggttatgttaatcagaagaaatttggtggtgatactccttatagttttatgtttggacctgatatatgtgggactcaaacaaagaagcttcatgttatcatgtcttaccaaggacagaattatccaatcaagaaggatttgcaatgtgaaactgataagttgactcatttctatacatttattcttagacctgatgcatcttacagtgtgttggttgataatagagagagggaatcaggaaccatgtatacagattgggatatacttcctccgccgaaaatcaaagataccaaagcaaagaggccggcggactgggatgatagggaatatattgaggatcctaatgatgtcaaaccagagggatatgattctatcccccgggagattcctgatcctaaggctaaagagcctgataattgggatgaagaggaggatggaatatggaggccacccaagataccaaatccagcttacaaaggaccatggaaaagaaagaaaatcaagaaccccaactataaaggaaaatggaagactccatggatcgataacccagagtttgaagatgatcctgacctttatgtgctaaagcccataaagtatgtgggtattgaagtttggcaggtgaaggctggttcaatttttgacaatatattgatctgtgatgacccacaatatgcgagagaaattgtgaaagatgtattccagaatagagagatcgaaaaagatgcctttgaggaagcagagaaagtgagaagagctcgagaagaagaggaagctcagagagctagagaggaaggtgaaaagaggaggaaagaaaggggctacaggaagcctcgtagaaggcacgatcctcgggattacttggatgattaccatgatgaactataa

SEQ ID NO: 211 - protein, 424 aa, Populus trichocarpa
MEKKLRLHVVQALKLLFLLFTIHCLFLFPVTLSEIFFEERFQDGWKDRWVLSDWKRSEGKAGTFKYTAGKWPGDPDDKGIQTYNDAKHFAISAKISPEFSNKNRTLVVQYSIKFEQEIECGGGYIKLFSGYVNQKKFGGDTPYSFMFGPDICGTQTKKLHVIMSYQGQNYPIKKDLQCETDKLTHFYTFILRPDASYSVLVDNRERESGTMYTDWDILPPPKIKDTKAKRPADWDDREYIEDPNDVKPEGYDSIPREIPDPKAKEPDNWDEEEDGIWRPPKIPNPAYKGPWKRKKIKNPNYKGKWKTPWIDNPEFEDDPDLYVLKPIKYVGIEVWQVKAGSIFDNILICDDPQYAREIVKDVFQNREIEKDAFEEAEKVRRAREEEEAQRAREEGEKRRKERGYRKPRRRHDPRDYLDDYHDEL

SEQ ID NO: 212 - DNA, 1602 bp, Populus trichocarpa
atgagagaagcaaaacgtgtctctctccgattggcgattgtgttgctgttagctttcatttctttcaatcagctctttgctgaagatgatacgatcttgtatgagtcgtttgacaagtccttcgatggaagatggattgtttcagagaaagaaggctataacggcgagtggaagcatgaaaagagtgaggggcatgatgattatgggcttcttgtgagtgagccagctaggaagtatgccattgtgaaggaactcgatgagcctgcgagtcttaaggatggaactatcgttctccaattcgagactcgccttcagaaagggcttgaatgtggtggtgcgtacttgaagtatctaagaccccaggaggctgggtgggtgcccaagggttttgacaatgagtctccttattcaattatgtttgggcctgacaaatgtggaaccacaaacaaggttcactttatcttgaagcataagaacccgaagagcggggagtatgttgagcatcacctcaagttcccgccttcagttccacatgacaagcttactcatgtgtacactgctatcttgaaacctgacaatgagttgcaaattctggtcgatggagaagagaagaagaaggcaaatttcctttcatccgaagattttgagcccccacttatccctgccaagaccatccctgatccagatgatgtgaaacctgaggattgggatgagagagcaaagattcctgatcccgaggcagtgaagccagatgactgggatgaggatgcacctatggaaattgaagatgaggatgctgttaaacctgaaggatggttggatgatgagcctgaggagattgatgatcctgaggcaaccaaaccagaagattgggatgaggaggaagatggtgagtgggaggcacccaagactgataacccaaagtgtcaggaaggcccaggttgtggtgaatggaagaggccaatgaagagaaatccagcatacaagggaaaatggcatgctccacttattgacaaccccaactataagggcatttggaagcctcaagagatcccaaaccccgactactttgagctcgaccagcctgaatttgagcccattgctgctgttggtattgagatctggacaatgcaggatggcatattgtttgacaatatcttgattgcacaggatgagaaggttgcatcctctattcgggatacaacatggaagccaaagtttgacgttgagaaggagaaagagaaggctaccgaagcagctgctggtacagatgctcttggtggcttccagaagaaggtttttgaaatcctttaccaggttgcagagatttctttcttaagcgagcacaaggataaaattattgaactcatcgagaaggcagagaaacaaccaatcatcacaattggtgtccttgtctccattgtggtggtcatcctcaccgttttcttgaagttaatttttggtggaaagaaggccgcggtggagaagaaacccgaaccagttgccgagacatccaacacggaaggaagcagtgaagagaaggcagaagagaatgaggagcctgctcctgctcgtaagaggcaaaccaggcgtgagacttaa

SEQ ID NO: 213 - protein, 533 aa, Populus trichocarpa
MREAKRVSLRLAIVLLLAFISFNQLFAEDDTILYESFDKSFDGRWIVSEKEGYNGEWKHEKSEGHDDYGLLVSEPARKYAIVKELDEPASLKDGTIVLQFETRLQKGLECGGAYLKYLRPQEAGWVPKGFDNESPYSIMFGPDKCGTTNKVHFILKHKNPKSGEYVEHHLKFPPSVPHDKLTHVYTAILKPDNELQILVDGEEKKKANFLSSEDFEPPLIPAKTIPDPDDVKPEDWDERAKIPDPEAVKPDDWDEDAPMEIEDEDAVKPEGWLDDEPEEIDDPEATKPEDWDEEEDGEWEAPKTDNPKCQEGPGCGEWKRPMKRNPAYKGKWHAPLIDNPNYKGIWKPQEIPNPDYFELDQPEFEPIAAVGIEIWTMQDGILFDNILIAQDEKVASSIRDTTWKPKFDVEKEKEKATEAAAGTDALGGFQKKVFEILYQVAEISFLSEHKDKIIELIEKAEKQPIITIGVLVSIVVVILTVFLKLIFGGKKAAVEKKPEPVAETSNTEGSSEEKAEENEEPAPARKRQTRRET

SEQ ID NO: 214 - DNA, 1617 bp, Populus trichocarpa
atgagagaagcgaaacgtatcactcttcgattggcgattgtgttgttgttagctttcgtttctttcaatcagctctttgctgacgatgatacgatctttcatgagacgtttgacgagtcgttcagtggaagatggattgtttcggagaaagaagactataaaggggtgtggaagcgtgaaaagagtgagggacatgatgattatggacttcttgtgagtgagccggctaagaagtatgccattgtgaaggaactcgatgagcctgtgagtcttaaggatggaattgtcctccaatttgagactcgccttcagagtgggcttgaatgtggtggtgcgtatttgaaatatctccgaccacaggaggctgggtgggtgcccaaggggtttgacagtgagtctccttattcgattatgtttggacctgacaaatgtggtaccacaaacaaggttcattttatcttgaagcataaaaacccaaagagtggggaatatgttgagcatcacctcaagttcccaccttccgttccacacgacaagcatactcatgtgtacaccgccatcttgaaatctgacaatgagttgcaaattctggttgatggagaggagaagaagaaggcaaacttcctcacatctgatgattttgagcccccacttgtccctgccaagacaattcctgatccagatgacgtgaaacctgaggattgggatgagagagcaaaaattcctgatcctgaggcagcgaagccagaggactgggacgaggatgcacctcttgaaattgtagatgaggatgctgtgaaacctgaaggttggttggatgatgagcctgaggagattgatgatcctgaagctacaaaaccagaagattgggatgaagaggaggatggtgaatgggaggcacccaagactgataacccaaagtgtgaggaagcccctggttgtggtgaatggaagaaaccaatgaagagaaatccagcatacaagggaaaatggcatgctccacttattgacaaccccaactacaagggtatctggaagcctcaggatattccaaaccccgactactttgagcttgaccagcctgactttgagcccattgctgctgttggtattgagatctggacaatgcaggatggcatattgtttgacaatatcttggttgcaaaggatgagaaggctgcagcttcaattagggatacaacatggaagccaaagtttgatgctgagaaggagaaacagaaggctgaggaagcagctactggcactgatggtcttgctggcttccagaagaaggtgttcgaactcctataccaggctgctgagctctctttcctaagcaagcacaaggacaaaattattgaactcatcgagaaggcagagaaacaaccgaacatcacaattggtgtccttgtctccgttgtggtggtgatccttactcttttcttcaggataatttttggtggaaagaaggctaaggtggagaagaaacctgagccagttgcggagacatccaacaaggaaggaagcagcagcggcgatgagaagaaagaagagactgaggccgagaatgaagctgctgctcctgctcgcaggaggccatcgaggcgtgagaactga

SEQ ID NO: 215 - protein, 538 aa, Populus trichocarpa
MREAKRITLRLAIVLLLAFVSFNQLFADDDTIFHETFDESFSGRWIVSEKEDYKGVWKREKSEGHDDYGLLVSEPAKKYAIVKELDEPVSLKDGIVLQFETRLQSGLECGGAYLKYLRPQEAGWVPKGFDSESPYSIMFGPDKCGTTNKVHFILKHKNPKSGEYVEHHLKFPPSVPHDKHTHVYTAILKSDNELQILVDGEEKKKANFLTSDDFEPPLVPAKTIPDPDDVKPEDWDERAKIPDPEAAKPEDWDEDAPLEIVDEDAVKPEGWLDDEPEEIDDPEATKPEDWDEEEDGEWEAPKTDNPKCEEAPGCGEWKKPMKRNPAYKGKWHAPLIDNPNYKGIWKPQDIPNPDYFELDQPDFEPIAAVGIEIWTMQDGILFDNILVAKDEKAAASIRDTTWKPKFDAEKEKQKAEEAATGTDGLAGFQKKVFELLYQAAELSFLSKHKDKIIELIEKAEKQPNITIGVLVSVVVVILTLFFRIIFGGKKAKVEKKPEPVAETSNKEGSSSGDEKKEETEAENEAAAPARRRPSRREN

SEQ ID NO: 216 - DNA, 1245 bp, Poncirus trifoliata
atgatgcttaagctgcttgtacttttccttttctttcaaatttcagtttctgagatcttttttgaagagcgatttgacgatggatggcgaagtcgttgggtaatatcagactggaaaagaagtgaagggaaagcgggatattttaagcacacagctggaaagtggcatggtgacccagatgataaaggtattcaaactcacaccgatgcaagacactatgccatatctgcaaaaataccagaatttagcaacaaaaacagaacattggttgtccagtattctatacgatttgagcaagacattgaatgtggtggtggatacctaaaacttctttctgcatatgtcaatcaaaagaaatttggtggagatgctccctacagtttaatgtttggaccagatatatgtggcacgcaaaagaagcatctccatgttatcctctcctaccagggtcagaattaccccatcaaaaaggagttggaatgtgaaacagacaagttgactcatttctacacatttattctcaggcctgatgccagttatagtatcctcattgataaccgagaaagggattctggtagcatgtacacggattgggatattcttcctccacggaaaatcaaagctgttaatgccaaaaagccagcggattgggatgatagagaatatattgatgatcctaatgccgtcaaaccagagggatatgattcaattccaaaagaaattccagacccgaaagctaaaaagcctgacaattgggatgaagacgaggatggcctatggaaaccaccaaagataccaaatcccgcatataaaggactatggaggcctaagaggatcaagaacccgaactataaaggaaagtggaagatcccttacattgacaatccagagtttgaagatgatcccgatctttacgtgcttaagccaattaagtatgtaggcattgaagtttggcaggtcaaggctggttcagtttatgacaacattttgatctgtgatgatcctgcatatgcaaaacaagtggtcgaggaagtactttctaacagggagattgaaaaagagggttttgaggaagcagagaaagtgagaaaagtgcgagaggaagaggaagctcaacgagcacgagaggaaggtgaaaagaggagaagagagaggggttatgatcgaagaagatatagggatcgctacagagataaataccgaaggcatgattacttggacgatgattatcatgatgagctatga

SEQ ID NO: 217 - protein, 414 aa, Poncirus trifoliata
MMLKLLVLFLFFQISVSEIFFEERFDDGWRSRWVISDWKRSEGKAGYFKHTAGKWHGDPDDKGIQTHTDARHYAISAKIPEFSNKNRTLVVQYSIRFEQDIECGGGYLKLLSAYVNQKKFGGDAPYSLMFGPDICGTQKKHLHVILSYQGQNYPIKKELECETDKLTHFYTFILRPDASYSILIDNRERDSGSMYTDWDILPPRKIKAVNAKKPADWDDREYIDDPNAVKPEGYDSIPKEIPDPKAKKPDNWDEDEDGLWKPPKIPNPAYKGLWRPKRIKNPNYKGKWKIPYIDNPEFEDDPDLYVLKPIKYVGIEVWQVKAGSVYDNILICDDPAYAKQVVEEVLSNREIEKEGFEEAEKVRKVREEEEAQRAREEGEKRRRERGYDRRRYRDRYRDKYRRHDYLDDDYHDEL

SEQ ID NO: 218 - DNA, 1647 bp, Phaseolus vulgaris
atgggagaacgaaagcgaatccctctcgggatgtttgcggtgctcctcttgatctctgcctcttcttttcagtttctctgcgctactgaagatgcagatgacgcgatcttctacgaatcattcgatgaggattttcaagatcgttggatcgtgtctcagaaagaagaatacagtggtgtctggaaacatgccaagagtgagggacatgatgatcatggtcttcttgtcagtgagaaagcaagaaaatatgctatagtgaaggaacttgacggggcagtgagtctcaaggatggaactgttgttctccagtttgaaactcggcttcagaatggacttgaatgtggaggagcatatataaaatatctccgaccacaggatgctggatggaaatctaaggaatttgacaacgaatctccgtattctatcatgtttggtcctgataagtgtggtgccacaaacaaagtacacttcattttcaaacacaagaatcccaagactggggagtatgttgagcaccatcttaagaatcccccttctgtcccttctgataaattaactcaggtgtacacggctattttgaagcctaacaatgaggtgcaaattttgcttgatggggaacagaagaagaaggcagacttcttaagtgctgatgattttgaacctccacttatcccgaccaagacaatcccagatccagatgataagaagcctgaggactgggatgagagagagaaaattccagacccaattgctgtaaagccagatgactgggatgaggaagcacccttggaaattgttgatgaagaagctgaaaaacctgaaggatggttagacgatgaacctgaggagatagatgatccagaggcaacaaaaccagaagattgggatgatgaggaggatggtgaatgggaagccccaaagattgagaacccaaaatgtgaagccgccccaggctgtggtgagtggaaaaggccaacgaagtcgaatccagcttataaaggaaaatggtatgccccacttattgaaaatcctgcttataagggtatatggaagcctagggatattccaaaccctgcttactttgaacttaaaaaacctgattttgagccaatcgctgctattggtatcgagatttggacaatgcaagatggcattttgtttgacaacatcttgatagctaaagatgataaaattgctgagtcctatcgggagactacatggaaacccaagttttcagttgaaaaagaaaaacagaaggaagaggaaaatgaagctggatcaagtggtattgcaggcttccagaagaaggtatttgacattttatacaagatcgcagacattcccttcctgagtgcctataagcctaaaatccatgatcttattgagaaaggtcaagagcaacccaatctcactgttgacatccttgtagccattttggttatcttcgtttcaattttcttcaggatcatatttggtgggaagaagcagcccacgaaggtggagacgaaggtggagaagacaaatgtagagtcctctagcagcaacaagaaaagtggtgagaatgtggagaatgaggaaaacaaagagaaggaggaatcctcatcgtctgcccctgcccgtcggaggtcaattaggagagagaattga

SEQ ID NO: 219 - protein, 548 aa, Phaseolus vulgaris
MGERKRIPLGMFAVLLLISASSFQFLCATEDADDAIFYESFDEDFQDRWIVSQKEEYSGVWKHAKSEGHDDHGLLVSEKARKYAIVKELDGAVSLKDGTVVLQFETRLQNGLECGGAYIKYLRPQDAGWKSKEFDNESPYSIMFGPDKCGATNKVHFIFKHKNPKTGEYVEHHLKNPPSVPSDKLTQVYTAILKPNNEVQILLDGEQKKKADFLSADDFEPPLIPTKTIPDPDDKKPEDWDEREKIPDPIAVKPDDWDEEAPLEIVDEEAEKPEGWLDDEPEEIDDPEATKPEDWDDEEDGEWEAPKIENPKCEAAPGCGEWKRPTKSNPAYKGKWYAPLIENPAYKGIWKPRDIPNPAYFELKKPDFEPIAAIGIEIWTMQDGILFDNILIAKDDKIAESYRETTWKPKFSVEKEKQKEEENEAGSSGIAGFQKKVFDILYKIADIPFLSAYKPKIHDLIEKGQEQPNLTVDILVAILVIFVSIFFRIIFGGKKQPTKVETKVEKTNVESSSSNKKSGENVENEENKEKEESSSSAPARRRSIRREN

SEQ ID NO: 220 - DNA, 1602 bp, Sorghum bicolor
atgatgggagggcgcgcgctgctgctgctcctcgtctcggcgctgctcgttcagatccgcgcctccgatccgctgctgtacgagccgttcgacgaggacttcgaggggagatgggtcgtctccaagaaggacgagtaccaaggtgtgtggaagcatgccaagagtgatggccatgaagactatggcctccttgtcagtgagaaggcaaggaaatacgccataatcaaggagcttgatgagccagttactttgaaggatgggacagtggtcctgcagtttgaagtgaggcttcagaatggccttgaatgtggaggtgcctacattaagtacatccgccctcaggatgctggatgggatgccaaggagtttgataatgagactccatacacaattatgtttggtccagataagtgtgggtcaaccaacaaggttcatttcatccttaagcacaagaatcccaagactggaaagtatgttgagcatcacctcaaattcccaccttctgtcccatatgacaagctctctcatgtctacacggctatcttgaagccagacaatgaggtcagaattttggtcgacggggaagaaaagaagaaggcaaacttcctttctgctgatgattttgagccagcacttatcccatccaagaccattcctgaccctgatgacaagaagccagaggactgggatgagagagctaaaatccctgatccagatgcagtgaaacctgatgactgggatgaggatgcccccatggaaattgtggatgaggaagccaccaagcctgagggatggttggatgacgagcctgaggagattgatgatcctgaggcagccaagcccgaggactgggatgatgaggaggatggtgaatgggaggcgccaaagattgacaacccaaagtgtgaagaggcacctggatgcggtgagtggaagaggccaatgaagcagaatcctgcttacaagggcaagtggcatgcacctatgattgacaaccccaactacaaggggatctggaagcctcaggagatccccaaccctgagtactttgagcttgacaagcctgattttgatccaattgctgctattggtattgagatctggacaatgcaggatggcatcctgtttgacaatatcttgattgctgatgatgagaaggttgccacctccattctggagaagacctggaagcccaagtatgatgttgagaaggaaaaggagaaggctgaggaggctgctgctggtgcggatggtctttctgagttccagaagaagatttttgacgtcctgtacaagattgctgatgttccgttcttggcaccctacaagaccaagatcattgatgttatcgagaagggagagaagcagcccaacatcactattggcattttggtctccgttgtcatcgtgttcgttactgttctcttcaggatcctttttggtggcaagaagccagcggtacctgtgaaacccgcagctgaggcgaagaagcccaaagccacagagaccgacggtgctggaagcagtggtgacaaggatgagaaagaggacgaaaaggaggagacagcagccccacgtcggaggacccgcagggagacgtag

SEQ ID NO: 221 - protein, 533 aa, Sorghum bicolor
MMGGRALLLLLVSALLVQIRASDPLLYEPFDEDFEGRWVVSKKDEYQGVWKHAKSDGHEDYGLLVSEKARKYAIIKELDEPVTLKDGTVVLQFEVRLQNGLECGGAYIKYIRPQDAGWDAKEFDNETPYTIMFGPDKCGSTNKVHFILKHKNPKTGKYVEHHLKFPPSVPYDKLSHVYTAILKPDNEVRILVDGEEKKKANFLSADDFEPALIPSKTIPDPDDKKPEDWDERAKIPDPDAVKPDDWDEDAPMEIVDEEATKPEGWLDDEPEEIDDPEAAKPEDWDDEEDGEWEAPKIDNPKCEEAPGCGEWKRPMKQNPAYKGKWHAPMIDNPNYKGIWKPQEIPNPEYFELDKPDFDPIAAIGIEIWTMQDGILFDNILIADDEKVATSILEKTWKPKYDVEKEKEKAEEAAAGADGLSEFQKKIFDVLYKIADVPFLAPYKTKIIDVIEKGEKQPNITIGILVSVVIVFVTVLFRILFGGKKPAVPVKPAAEAKKPKATETDGAGSSGDKDEKEDEKEETAAPRRRTRRET

SEQ ID NO: 222 - DNA, 1254 bp, Solanum habrochaites
atggctactcgacgaatgaaacgccctagctctctccatctcgttgctgtgttctcactactagtagtcgccgccgccgccgaggttttcttccaggaaagcttcaatgatggctgggaaagcaggtgggtaaaatctgaatggaagaaagatgaaaacatggctggagagtggaatcacacctctgggaaatggaatggtgatgccaatgacaaaggtattcagaccagtgaagactacaggttttacgccatttcggctgagttccctgaatttagtaacaagggaaagaacttagtgttccagttctctgttaagcatgagcagaagcttgactgtggtggtgggtacatgaagttgcttagtggagacgttgaccaaaagaaattcggtggtgacactccctacagtatcatgtttggaccagacatctgtggctacagtaccaagaaagttcatgctattctcacttataacgagacaaatcatttgatcaagaaggaagtcccatgtgagactgatcagctgacccatgtctacactttcatcctccgtcctgatgccacatacagtattctcattgacaatgtggagaaacagtctggtagcttgtactctgattgggacattctcccaccaaagaagatcaaggatccaagtgccaagaaacctgaagattgggatgacaaggaattcattgatgatcccgaggacaagaagccagagggctatgatgacattccagaggagataactgatcctgaagccaagaagccagaggactgggatgatgaagaagatggtgaatggacagccccaaccatccccaatccagagtacaagggcccatggaaggcaaagaaaatcaagaaccccaactacaagggaaagtggaaggctcctatgattgacaacccagacttcaaggatgacccagatctatatgttttcccaaaattgaagtatgttggagttgagctgtggcaagtgaaatctggaactttgtttgataatgttgtgatatgcgatgatccagagtttgccaagtcaattgcagaggaaacatggggaaagcagaaagatgctgaaaaggctgcttttgaggaagcagaaaagaagagagaggaggaggaatcaaagaatgctccagctgaatctgatgccgatgaagatgacgaggctgatgaggctgattcagatgatgctgatgacaagtctgactccaaggatgaggacacacatgatgaactgtaa

SEQ ID NO: 223 - protein, 417 aa, Solanum habrochaites
MATRRMKRPSSLHLVAVFSLLVVAAAAEVFFQESFNDGWESRWVKSEWKKDENMAGEWNHTSGKWNGDANDKGIQTSEDYRFYAISAEFPEFSNKGKNLVFQFSVKHEQKLDCGGGYMKLLSGDVDQKKFGGDTPYSIMFGPDICGYSTKKVHAILTYNETNHLIKKEVPCETDQLTHVYTFILRPDATYSILIDNVEKQSGSLYSDWDILPPKKIKDPSAKKPEDWDDKEFIDDPEDKKPEGYDDIPEEITDPEAKKPEDWDDEEDGEWTAPTIPNPEYKGPWKAKKIKNPNYKGKWKAPMIDNPDFKDDPDLYVFPKLKYVGVELWQVKSGTLFDNVVICDDPEFAKSIAEETWGKQKDAEKAAFEEAEKKREEEESKNAPAESDADEDDEADEADSDDADDKSDSKDEDTHDEL

SEQ ID NO: 224 - DNA, 1617 bp, Solanum lycopersicum
atggaagaaactagaaggaagatctgggcgcaatatgcgttcctgttattggcttgttgctttttctctcaactctacgctacttcagatgtgaagttctacgagtcatttgacgaagcatttgatgggcgatggatcgtatctgagaaagaggactattcaggtgtgtggaaacatgccaagagtgagggacatgatgattatggacttcttgttagtgagaaggctaggaaatacgctattgtcaaggagcttgacaatgttgttgacctcaaagatggaactgtggttcttcaatatgaggttcgcctccaggatggacttgaatgtggtggtgcttacataaaatacctccgcccccaggaagcagggtggaccgcaaagggttttgataacgagtccccctacacaataatgtttggacctgataaatgcggagccacaaacaaggtgcacttcattttgaaacacaagaaccctaagagtggagaatacgttgagcaccacctcaagtttcctccctctgtaccagctgacaagctaactcatgtttacactgctgtgttgaaaccggacaatgatgttcttatcttggttgacggagaagaaaagaagaaggctaacttcctctcatctgatgattttgagccaccacttattcctgctgtgaccattccagacccagaagacaagaagccggaggactggggtgagagagccaagattccagacccagatgctaagaaacctgatgattgggatgaggatgcaccaatggaaattgaagatgaggaagctgtaaagcccgaaggatggttggatgatgagcctgaggatgttgatgatcctgaggctaccaagcctgaagattgggatgatgaggaggatggtgaatgggaggctccgaaggttgacaacccaaaatgtgcagaagctcctggttgtggggagtggaaaagaccaatgatcagaaatccagtatacaagggaaaatggcacgctccgcttattgacaaccccaattacaagggtatttggaagccaagagatatcccaaatcctgactattttgaacttgacaaacccaactttgagcctatcgcagccattggcattgagatctggacaatgcaagatggcatattgtttgacaatatcttgattgctagtgatgaagaagttgcagaatcatacaggaagactgcctggaaacccaagtttgatgtagaaaaggagaaacagaaagctgaggaagaagcagaatctggtggcctcaaaggataccagaaattagtatttgacctcctctacaaggtagctggtatcccattcttgggtgaacacaagaccaaagtattggatcttctcgagaaagctgagaaacagcccaatatcacagttggtgtcgttgtctcaattgtagtggttgtcttctcagttctattgaagctcattttcggtgggaagaagcagcaacctgctagagctagtgccgagactgagaaaactgacggagctgaaacctcgacttccaatagtcaagccgctgaggagaaggaagagcagagtgaggatgctggtgctgctcctcgtcgaaggactaggcgcgacaattag

SEQ ID NO: 225 - protein, 538 aa, Solanum lycopersicum
MEETRRKIWAQYAFLLLACCFFSQLYATSDVKFYESFDEAFDGRWIVSEKEDYSGVWKHAKSEGHDDYGLLVSEKARKYAIVKELDNVVDLKDGTVVLQYEVRLQDGLECGGAYIKYLRPQEAGWTAKGFDNESPYTIMFGPDKCGATNKVHFILKHKNPKSGEYVEHHLKFPPSVPADKLTHVYTAVLKPDNDVLILVDGEEKKKANFLSSDDFEPPLIPAVTIPDPEDKKPEDWGERAKIPDPDAKKPDDWDEDAPMEIEDEEAVKPEGWLDDEPEDVDDPEATKPEDWDDEEDGEWEAPKVDNPKCAEAPGCGEWKRPMIRNPVYKGKWHAPLIDNPNYKGIWKPRDIPNPDYFELDKPNFEPIAAIGIEIWTMQDGILFDNILIASDEEVAESYRKTAWKPKFDVEKEKQKAEEEAESGGLKGYQKLVFDLLYKVAGIPFLGEHKTKVLDLLEKAEKQPNITVGVVVSIVVVVFSVLLKLIFGGKKQQPARASAETEKTDGAETSTSNSQAAEEKEEQSEDAGAAPRRRTRRDN

SEQ ID NO: 226 - DNA, 1206 bp, Selaginella moellendorffii
atggaggctcggtgcgcgtcttccgtctttctgctgctccttctttccagcctttgccacgcgaaggtcttctttgaggagagattcgatgattcttgggagagccgctgggtgaaatccgactggaagaagagtgaagatgccgctggcgagtggatccacaccgccggcaagtggtttggcgatgcggaggcagacaaaggcatccagacgtctccagacgcgcgcttctacgcaatctcggccgagttcccagagttcagtaacaaggacaagactctggttgtccaattctccgttaagcacgagcaaaatctcgattgcggaggtggatacatcaaaattctgggtggagatgtggatcaaaagacttttggtggtgatacaccttacagtattatgtttggaccggacatttgtgggtcgggcacgaagaaaacccacgccattattgcttacaatgcaagcaaccatcaaatgaaaaaggaagtgccatgcgaaacagaccagctcactcacgtctacactctggttattcgtcccgattctacgtacagcattttgatcgacaatgtagagaagaagaagggaagcattgagagcgactggagtcttttgccgccaaagaagatcaaggatcccgaggccaagaagcccgaggattgggttgatgatgaattcattgttgacccggaagacaagaaaccagagggttatgatgacattccagcagagattcccgatgctgaggctgaaaagcccgaaggatgggatgacgaggaggacggtgtgtggactcctccgacgattccaaatcccgaatacaagggcccctgggaaccgaagaaaatcaagaatcctgctttcaagggaaagtggaaggctccaatgattgacaatcctgattacaagccagacccagagctatacgtcttcccttcattgaaatacgttggaattgaactctggcaggtcaagtcaggatctctctttgacaacattctcgtaagcgacgatgtcgattatgccaaggccctggcggaggagacatggggaaagagcagggaggccgagaagaaagcattcgaggaagcacagaaaaaggatgaaccgccggccgacgacgacgacgacgaggacgactcggatgtcaaggaggacaaggaagaggacacagaagacacaaaggagcatgacgagctttga

SEQ ID NO: 227 - protein, 401 aa, Selaginella moellendorffii
MEARCASSVFLLLLLSSLCHAKVFFEERFDDSWESRWVKSDWKKSEDAAGEWIHTAGKWFGDAEADKGIQTSPDARFYAISAEFPEFSNKDKTLVVQFSVKHEQNLDCGGGYIKILGGDVDQKTFGGDTPYSIMFGPDICGSGTKKTHAIIAYNASNHQMKKEVPCETDQLTHVYTLVIRPDSTYSILIDNVEKKKGSIESDWSLLPPKKIKDPEAKKPEDWVDDEFIVDPEDKKPEGYDDIPAEIPDAEAEKPEGWDDEEDGVWTPPTIPNPEYKGPWEPKKIKNPAFKGKWKAPMIDNPDYKPDPELYVFPSLKYVGIELWQVKSGSLFDNILVSDDVDYAKALAEETWGKSREAEKKAFEEAQKKDEPPADDDDDEDDSDVKEDKEEDTEDTKEHDEL

SEQ ID NO: 228 - DNA, 1158 bp, Selaginella moellendorffii
atgaggattttcgagctcgcggccactctcctgccggcactgttcgcggtgatcctcgcgttttctcttccgggcgccgcggaaatcttctttgaggagcgattcgacgatggatgggagcatagctgggtgcaatccgattggaagcgctcggatggtctagccgggaactggcggcacacggccgggaaatggcacggtgatcctgatgacaagggtatccagacatatccagattctcgttacttcgctatctcggctcagttcccggtgctcaatacgaaaggaaagacgcttgtgattcagtactccgtcaagcacgaacaaaagatcgagtgtggcgggggatacatcaagttgctcagtggctacatgaatcaaaagcgatttagtggagatacaccttacagcataatgtttggtcccgacatttgtggaactcaaacaaagaagatccacacgattttgcagtataagagccagaactatccgattcggaaggaagtcccttgcgagacggaccagctcactcacgtttacacgttgataattcgtccagacgcgacttacagcatcctcgtcgacaacagagagagggattcgggcagtctctataccgactgggatatgctacctccaaagcggatcaaagatccaaacgctaaaaagcctgccgattgggaggataaagagtatattgtggatccagatgacaaaaagccagaggggtacgactccattccagcagaaattccagacccagactcgacaaagcctgacaactgggatgaagatgaacatggagtatggaaagtaccaaacgtgcctaatcctgcttatagaggaccatggaaaccgaagaaaataaaaaatcccaactataaaggaaaatggtcgccattggctgacaatccagaatttgaggacgatcccgacttgtatgtgtttccgaatctcaagtacatcggtatagaactttggcaggtgaaatccggaactctcttcgacaatatccttgtatgtgatgatcctgaatatgcccgatcggtggcagaagctacgtggggtgccaacaaggatttggagaaagaggcttttgatgaatctgagaagcggagacaggaacaagaggaggtacagacttttgcatcatcgtag

SEQ ID NO: 229 - protein, 385 aa, Selaginella moellendorffii
MRIFELAATLLPALFAVILAFSLPGAAEIFFEERFDDGWEHSWVQSDWKRSDGLAGNWRHTAGKWHGDPDDKGIQTYPDSRYFAISAQFPVLNTKGKTLVIQYSVKHEQKIECGGGYIKLLSGYMNQKRFSGDTPYSIMFGPDICGTQTKKIHTILQYKSQNYPIRKEVPCETDQLTHVYTLIIRPDATYSILVDNRERDSGSLYTDWDMLPPKRIKDPNAKKPADWEDKEYIVDPDDKKPEGYDSIPAEIPDPDSTKPDNWDEDEHGVWKVPNVPNPAYRGPWKPKKIKNPNYKGKWSPLADNPEFEDDPDLYVFPNLKYIGIELWQVKSGTLFDNILVCDDPEYARSVAEATWGANKDLEKEAFDESEKRRQEQEEVQTFASS

SEQ ID NO: 230 - DNA, 1626 bp, Solanum tuberosum
atggaagaaactagaaggaagatctgggcgcaatatgcgttcctgttattggcttgttgcttcttctctcaactctacgctacttctgatgtgaagttctacgagtcatttgatgaagcatttgatgggcgatggatcgtatctgagaaagaggagtattcaggtgtgtggaaacatgccaagagtgagggacatgatgattatggacttcttgttagtgagaaggctaggaaatacgccattgtcaaggagcttgacaatgttgttgacctcaaagatggaactgtggtccttcaatatgaggttcgcctccaggatggacttgaatgtggtggtgcttacataaaatacctccgcccccaggaagcaggttggaccgcaaagggttttgataacgagtccccctacacaataatgtttggacctgataaatgcggagccacaaacaaggtgcacttcattttgaaacacaagaaccctaagagtggagaatacgttgagcaccacctcaagtttcctccttctgtaccagctgacaagctaacccatgtttacactgctgtgttgaaaccggacaatgatgttcttatcttggttgacggagaagaaaagaagaaggctaacttcctctcatctgatgattttgagccaccactcattcctgctgagaccattccagacccagaagacaagaagcctgaggactgggatgagagagccaagattccagacccagatgctaagaaacctgatgattgggatgaggatgcaccaatggaaattgaagatgaggaagccgagaagcccgaaggatggttggatgatgagcctgaggatgttgatgatcctgaggccactaagcctgaagattgggatgatgatgaggatggtgaatgggaggctccaaaggttgacaacccaaaatgtgcagaagctcctggttgtggggagtggaaaagaccaatgatcagaaatccagcgtacaagggaaaatggcacgctccacttattgacaaccccaattacaagggtatttggaagccaagagatatccccaatcctgactattttgaacttgacaaacccaactttgagcctatcgcagccattggcattgagatctggacaatgcaagatggcatattgtttgacaatatcttgatcggtagtgatgaaaaagttgcagaatcatacaggaagactgcctggaaacccaagtttgatgtagaaaaggagaaacagaaagccgaggaagaagcagaatctggtggcctcaaaggataccagaaagtggtatttgacctcctctacaaggtagctggcgtcccattcttgggtgagcacaaggccaaagtattggatcttctcgagaaagctgaaaaacaacccaatatcacagttggtgtcgttgtctcagtcgtagttgttgtcttctcagttctattgaagcttatcttcggtgggaagaagaagcagcagcctgctagagctagtgccgagcctgagaaaactgacggagctgaaacatcgacttccaatagtcaagccgctgaggagaaggaagagcagagtgaggatgctgatgctgctgctgctcctcgtcggaggaccaggcgcgacaattag

SEQ ID NO: 231 - protein, 541 aa, Solanum tuberosum
MEETRRKIWAQYAFLLLACCFFSQLYATSDVKFYESFDEAFDGRWIVSEKEEYSGVWKHAKSEGHDDYGLLVSEKARKYAIVKELDNVVDLKDGTVVLQYEVRLQDGLECGGAYIKYLRPQEAGWTAKGFDNESPYTIMFGPDKCGATNKVHFILKHKNPKSGEYVEHHLKFPPSVPADKLTHVYTAVLKPDNDVLILVDGEEKKKANFLSSDDFEPPLIPAETIPDPEDKKPEDWDERAKIPDPDAKKPDDWDEDAPMEIEDEEAEKPEGWLDDEPEDVDDPEATKPEDWDDDEDGEWEAPKVDNPKCAEAPGCGEWKRPMIRNPAYKGKWHAPLIDNPNYKGIWKPRDIPNPDYFELDKPNFEPIAAIGIEIWTMQDGILFDNILIGSDEKVAESYRKTAWKPKFDVEKEKQKAEEEAESGGLKGYQKVVFDLLYKVAGVPFLGEHKAKVLDLLEKAEKQPNITVGVVVSVVVVVFSVLLKLIFGGKKKQQPARASAEPEKTDGAETSTSNSQAAEEKEEQSEDADAAAAPRRRTRRDN

SEQ ID NO: 232 - DNA, 1050 bp, Triticum aestivum
atgacgacgggagggagcgcggtgctcctactgccgcttctggtggcctcggcgctgttcgcgcagatccgcgcgtcggatccgctgttccacgagtccttcgacgagggcttcgaggggagctgggtcgtctccggcaaggaagagtactcaggtgtatggaagcacgagaagagtgatggccatgaagactatggtctccttgtcagtgagccagccaggaaatatgccatagtcaaagagcttgatagccctgttactttgaaggatgggacagttgtcctgcagttcgaagtgaggcttcagaatggcctcgagtgtggaggtgcttatcttaagtacattcgccctcaggaggctggatgggatgccaaggaatttgacaatgacactccttacacaattatgtttggtcctgacaagtgtggttcaacgaacaaggttcacttcatcctgaagcacaagaaccccaagactggcaaatatgttgaacatcacctcaagtccccaccctctgtcccatatgacaagctctctcatgtctacacggctatcttgaagccggataacgaggtcagaattttggttgatggggaggagaagagcaaagcaaacttcctgtccgctgacgattttgagccagcacttattccatcaaagaccattcctgaccctgacgacaagaagccagaggactgggacgagagagctaaaatccctgacccagctgcagtgaagcccgatgactgggatgaggatgccccaacagaaattctggatgaggaggccaccaagccagaaggatggttggatgatgagcctgaggaagttgatgacccagaggctgctaagcccgaagactgggatgatgaggaggatggcgaatgggaggcaccgaagatcgacaaccccaagtgtgaagaggcacctggatgtggtgaatggaagaggccaatgaagcagaaccctgcctacaagggcaagtggcatgcacccatgattgacaccggcctaagggaattgagccccaaaaccccacccgaatattga

SEQ ID NO: 233 - protein, 349 aa, Triticum aestivum
MTTGGSAVLLLPLLVASALFAQIRASDPLFHESFDEGFEGSWVVSGKEEYSGVWKHEKSDGHEDYGLLVSEPARKYAIVKELDSPVTLKDGTVVLQFEVRLQNGLECGGAYLKYIRPQEAGWDAKEFDNDTPYTIMFGPDKCGSTNKVHFILKHKNPKTGKYVEHHLKSPPSVPYDKLSHVYTAILKPDNEVRILVDGEEKSKANFLSADDFEPALIPSKTIPDPDDKKPEDWDERAKIPDPAAVKPDDWDEDAPTEILDEEATKPEGWLDDEPEEVDDPEAAKPEDWDDEEDGEWEAPKIDNPKCEEAPGCGEWKRPMKQNPAYKGKWHAPMIDTGLRELSPKTPPEY

SEQ ID NO: 234 - DNA, 1284 bp, Theobroma cacao
atggcgattcgcgaacgaaaccctagtgttctatgtctaatcattgtctctctcatcgccgtcacctctgctaaagtgttcttcgaagaacgcttcgaagatggatgggagaaccggtgggtaaaatctgactggaagaaagatgagaaaacggctggtgaatggaacttcacttctggaaaatggaatggagaccctaatgacaaaggtatccaaactagtgaagactacaggttctatgctatttcagctgagttcccagaacttaacaacaaggacaagactcttgtcttccaattttctgtcaagcatgagcagaagcttgactgtggtggtggctacatgaagttgctcagtggtgatgttgaccagaagaaattcggtggtgacaccccatacagcattatgtttggaccagatatctgtggttacagcaccaagaaagtgcatgctattcttaactacaacgagacaaaccacttgatcaagaaggaagttccttgtgagactgaccaactcactcacatttatacattcattctccgcccagacgctacctacagcatccttgttgataatgttgagaaacaaactggtagcttgtacactgattgggatcttctcccaccaaagaaaatcaaggatcctgaggccaagaagcctgaagattgggatgacaaagaatacatccctgatcctgaagacaagaagcctgagggttatgatgacatccctaaagagatccctgaccctgatgctaagaagcctgaagattgggatgatgacgaagatggtgaatggacagccccaacaattgccaaccctgagtacaacggcccatggaagccaaagaaaattaagaaccccaactacaagggcaagtggaaggcaccgctcattgacaacccagacttcaaggatgatcctgatatctacgttttccccaagttgaagtatgttggtattgaattgtggcaggtgaaatccgggacattgtttgataatgtcttagtcgctgatgatccagagtatgccaagacactagctgaagaaacatggggcaagcagaaggatgctgagaaggcagcatttgaggaggcagagaagaagagagaggaggaggaatcaaaggatgacccagctgattctgatgttgaggacgaagatgacgacactgatgatgctgaaggaaatgagtctgactccgataccaaatccgacgcaagcaaagacagtgaggagatcaaggaagagaccgaggaagatgtacatgacgagctgtaa

SEQ ID NO: 235 - protein, 427 aa, Theobroma cacao
MAIRERNPSVLCLIIVSLIAVTSAKVFFEERFEDGWENRWVKSDWKKDEKTAGEWNFTSGKWNGDPNDKGIQTSEDYRFYAISAEFPELNNKDKTLVFQFSVKHEQKLDCGGGYMKLLSGDVDQKKFGGDTPYSIMFGPDICGYSTKKVHAILNYNETNHLIKKEVPCETDQLTHIYTFILRPDATYSILVDNVEKQTGSLYTDWDLLPPKKIKDPEAKKPEDWDDKEYIPDPEDKKPEGYDDIPKEIPDPDAKKPEDWDDDEDGEWTAPTIANPEYNGPWKPKKIKNPNYKGKWKAPLIDNPDFKDDPDIYVFPKLKYVGIELWQVKSGTLFDNVLVADDPEYAKTLAEETWGKQKDAEKAAFEEAEKKREEEESKDDPADSDVEDEDDDTDDAEGNESDSDTKSDASKDSEEIKEETEEDVHDEL

SEQ ID NO: 236 - DNA, 1299 bp, Triphysaria sp.
atggcgattacgcagagaagattgcggacactaaaccctaacgttctctcttcagctgttgctctatcgcttctcctcgttgtctcctctgccaaagtaatcttcgaggagcgttttgatgaggggtgggagagtcggtgggtcaaatctgactggaagaaagaggacaacttggctggtgagtggaattacacctctgggaagtggaatggggatgctaacgataaaggtattcagaccagtgaagattataggttctatgccatctcagctgaattccctgaattcagcaacaaagataagacattagttttccagttttctgttaagcacgagcagaagctcgactgtggtggtggatacatgaagttactgagtggtgatgttgaccagaaaaagtttggtggtgacaccccttacagtatcatgtttggacctgacatctgtgggtacagcaccaaaaaggtccatgctattttgacccgcaatgaaacgaaccacttgatcaacaaggacgttccatgcgagactgaccaattgagccatgtctacactttcatcctccgcccggatgctacttacagcattctcattgacaatgaggaaaagcaaactggtagcgtatacggtgactggtctattctcccaccaaagacgatcaaggaccctgaagctaaaaagcctgaggattgggacgacaaggagtacattcctgaccccgaggacaaaaagccagatggttatgatgacatcccagaggagattgaggattctgaagccaaaaagcctgaggactgggatgaagaagaggatggtgcctggactcctcctatgattcccaactctgattacaagggtccgtggaaggcaaagaaaattaagaaccccagctacaagggcaagtggaaggcaccaatgattgacaacccagacttcaaggatgatccagatatctatgttttccctaagttgaagtatgtagggatagagttgtggcaggtgaaatcaggaaccttgtttgacaatgtcttggtatctgatgaccccgaatatgctaagaagctagctgaagaaacatggggcaaacaaaaggatgctgagaaggctgcttttgatgaggcagaaaagaagaaagaagaagaggaatcaaaggacgacgaaacagctgaatctgatgctgaggatggagatgttgatgacgatgttgacgatagaaaacatcctgaagatgctatcaaatctgcttctgatgaagatgttgcagactcaatcgacagtgatgcacatgacgagctgtag

SEQ ID NO: 237 - protein, 432 aa, Triphysaria sp.
MAITQRRLRTLNPNVLSSAVALSLLLVVSSAKVIFEERFDEGWESRWVKSDWKKEDNLAGEWNYTSGKWNGDANDKGIQTSEDYRFYAISAEFPEFSNKDKTLVFQFSVKHEQKLDCGGGYMKLLSGDVDQKKFGGDTPYSIMFGPDICGYSTKKVHAILTRNETNHLINKDVPCETDQLSHVYTFILRPDATYSILIDNEEKQTGSVYGDWSILPPKTIKDPEAKKPEDWDDKEYIPDPEDKKPDGYDDIPEEIEDSEAKKPEDWDEEEDGAWTPPMIPNSDYKGPWKAKKIKNPSYKGKWKAPMIDNPDFKDDPDIYVFPKLKYVGIELWQVKSGTLFDNVLVSDDPEYAKKLAEETWGKQKDAEKAAFDEAEKKKEEEESKDDETAESDAEDGDVDDDVDDRKHPEDAIKSASDEDVADSIDSDAHDEL

SEQ ID NO: 238 - DNA, 1281 bp, Triphysaria sp.
atggcaacgcttaagcacaagccactggcatcaattttactggtgctaatatcttcactattttgctcttcatttgctgaaatcatttttgaggagcggtttgaaggtggttggcaagatagatgggtgaaatctgattggaaaaggagtgaggggaaagctggatcgtttaagcattcagctggaaaatggcatggtgatcctgatgatagaggtattcagacaaccactgatgctcggcattttgctatatctgcgaagataccagaattcagcaataagaatagaaccttggttgttcaatattccattagacttgagcaggatatcgaatgtggtggtggttacattaagcttctttctggttacgttaaccaaaagaaatttggtggggacactccttatagtatgatgtttggacctgatatatgcggcactcagacaaagaaactacacgtcatactttcatatcagggtcaaaactaccccatcaagaaggatttgcaatgtgaaacagataagttaacccatttttatacattcgttcttcggcccgatgcatcatacagtgtcctggtcgatggtcgagaaagagattctggtagcatgtatactgactgggatattttacctccccgcaaaattaaagcggtgaatgcaaaaaagcctgcagactgggatgatagagaatatataaatgacccaagtgctgctaaacccgagggatatgattcaattccgcgtgaaatacctgatccaaaggcaaaagagccatatgactgggatgaagatgatgatggaatatggaaagcacccaaaattccaaatcctgcttacaagggaccctggaaggctaagaaaatcaagaatcctaattataaaggaaaatggaagatcccttatattgataatcctgaatttgaagacgatcctgatctatatgttcttaagccaatcaagtatgttggcattgaagtttggcaggtgaaagctggctctgtttttgacaacattctgatttctgacgatcccgactatgcaaagaatgtggtgaacgaagtatttgctaatagggaggctgaaaaagaagcctttgaggaggcggagaaagtgagaaaagccaaggaggacgaggaagctcagagagcaagagaagaaggtgaaaggaggagaagagaaaggggtgacgatagaaggcatcgagacagggagcgccatagggacagatacagaaagcaccgacgtgattatatggatgacgactatcatgatgaactttaa

SEQ ID NO: 239 - protein, 426 aa, Triphysaria sp.
MATLKHKPLASILLVLISSLFCSSFAEIIFEERFEGGWQDRWVKSDWKRSEGKAGSFKHSAGKWHGDPDDRGIQTTTDARHFAISAKIPEFSNKNRTLVVQYSIRLEQDIECGGGYIKLLSGYVNQKKFGGDTPYSMMFGPDICGTQTKKLHVILSYQGQNYPIKKDLQCETDKLTHFYTFVLRPDASYSVLVDGRERDSGSMYTDWDILPPRKIKAVNAKKPADWDDREYINDPSAAKPEGYDSIPREIPDPKAKEPYDWDEDDDGIWKAPKIPNPAYKGPWKAKKIKNPNYKGKWKIPYIDNPEFEDDPDLYVLKPIKYVGIEVWQVKAGSVFDNILISDDPDYAKNVVNEVFANREAEKEAFEEAEKVRKAKEDEEAQRAREEGERRRRERGDDRRHRDRERHRDRYRKHRRDYMDDDYHDEL

SEQ ID NO: 240 - DNA, 1611 bp, Vitis vinifera
atggaaggaaggcagatccgtgcggtgttggtgttggtagtgatttcttgcgttggcttccagatccgcgcttctgatccgatctttattgagtccttcgatgagtctttcgatgggcgctggattgtttctgagaaagacgactataaaggtatatggaaacactcaaagagcgagggacatgatgattatgggcttcttgtcagtgagcaggcaaagaagtatgcaatagtgaaagagcttgatgaagccgttagtctcaaagatggaaccattgttctgcaatttgaggtgcggctccagaaaggattggaatgtggtggtgcatacttgaaatacctccgaccccaggaggctggatggaaacctgctgagtttgataatgactctccatactccataatgtttggaccagacaaatgtgggtcgacaaacaaggtgcacttcatccttaagcacaagaaccccaaaagtgggaaatatgttgagcaccatctcaagtaccctccttctgtgccctctgacaaactgtctcatgtctacaccgcaatattgaaacctgataatgaactgcggattctgattgatggggaagagaagaagaaggcaaatttcctctcagctgaagattttgagccagctctaattcctgctgagactattccggatccaaatgataagaagccagaggattgggatgaaagggcaaagattccagacccagatgcagtgaagccagatgattgggatgaggatgcacccatggagattgaagatgaggaagctgtcaagcctgaagggtggttggatgatgagcctgaggagatcgatgatcctgatgcttcaaagccagaagattgggatgatgaggaggacggtgaatgggaagctcctaaaattgataacccaaagtgtgagatagcacctggatgtggtgagtggaagaggccaatgaagaggaatcctgcttacaaaggaaaatggcatgcccctctaattgacaatccagattataagggcatttggaagcctcagcagatcccaaaccctgattactttgagctcgacagacctgattttgaacctattactgccattggcatcgagatttggacaatgcaagatggtgttttgtttgataatattttgatagccaatgatgagaaggttgcagaagcatacagggacactacatggaagctgaagtttgaagtcgagaaagaaaaacaaaaggctgaggaagcagcatctggtctctcagatggcctctctggcttgcagaaggcagtttttgacattctctacaaaataggtggcttgcctttcttgagtgcttacaaagtccagatctttgatctcattgaaaagggagaaaaacaaccaaatttgacaattggcatcctcgtatccattgtggtggttatcttgtcggttttctttaaaatcctttttggtgggaaaaaaccagcggtcaatgtcactgagacaaagaatgaggtgcctgcagagacttctgataatcaaggaagcagtgcagagaaagaagatgagaatgagaatgaagatgcggctgctgctgctcctcgcaggaggactagaagggatacctga

SEQ ID NO: 241 - protein, 536 aa, Vitis vinifera
MEGRQIRAVLVLVVISCVGFQIRASDPIFIESFDESFDGRWIVSEKDDYKGIWKHSKSEGHDDYGLLVSEQAKKYAIVKELDEAVSLKDGTIVLQFEVRLQKGLECGGAYLKYLRPQEAGWKPAEFDNDSPYSIMFGPDKCGSTNKVHFILKHKNPKSGKYVEHHLKYPPSVPSDKLSHVYTAILKPDNELRILIDGEEKKKANFLSAEDFEPALIPAETIPDPNDKKPEDWDERAKIPDPDAVKPDDWDEDAPMEIEDEEAVKPEGWLDDEPEEIDDPDASKPEDWDDEEDGEWEAPKIDNPKCEIAPGCGEWKRPMKRNPAYKGKWHAPLIDNPDYKGIWKPQQIPNPDYFELDRPDFEPITAIGIEIWTMQDGVLFDNILIANDEKVAEAYRDTTWKLKFEVEKEKQKAEEAASGLSDGLSGLQKAVFDILYKIGGLPFLSAYKVQIFDLIEKGEKQPNLTIGILVSIVVVILSVFFKILFGGKKPAVNVTETKNEVPAETSDNQGSSAEKEDENENEDAAAAAPRRRTRRDT

SEQ ID NO: 242 - DNA, 1629 bp, Vitis vinifera
atgggagaagggaaacgagtttctctgctacccctatatgttgtgtttgctgtaatagcttgcgcatcacttcagctatgcgcttctgattctatcttctacgagtctttcgacgacgattttgaagggcgttggatcgtttctgagaaagaagactataaaggtgtatggaaacatgcaaagagtgacggacatgaggatcatgggcttcttgtgagtgagaaagctaggaagtatgctatagtgaaagagcttgatgaggcagtgagtctaaaggatggaactgctgttctccagtttgagactaggctccagaatgggcttgagtgtggtggtgcatatctaaaatatcttcgacctcaggatgctacatggaaatccaaagaatttgacaatgaatctccctattctatcatgtttggacctgacaaatgtgggtctacaaacaaggtgcactttatcgtaaagcataagaacccgaagagtggggaatacattgaacaccatctcaagtatccaccctctgttccatctgacaaattatctcatgtctatactgcgattttgaagcctgatcatgaggtgcgaattctgattgatggtgaggaaaagaagaaggcaaatttcctctcatctgaagattttgagcctccatttatccctgctaagaccattcctgacccagatgataagaaaccagaggattgggatgagaggccaaaaattccagaccccaatgcggtaaagcctgatgactgggatgaggatgcacccatggaaattgaagatgaagaagcagtaaaacctgaaggatggttggatgatgaacctgaggagatagatgatcccgaagcctccaaaccagaagattgggatgatgaggaggatggtgaatgggaggcaccaaagatagataacccaaagtgtgagattgcacctggttgtggtgaatggaagaagccattgaagaggaatccagcttacaaggggaaatggcatgcccctcttattgacaaccccaattacaagggtatttggaagcctcagcagattccaaaccctgactattttgaacttgatcatcctgacattgagcctgttgctgccattggcattgagatttggacaatgcaggatggtatattgtttgacaatattttgataactagtgatgagaagactgcagaatcatatcgggagaccacatggaagccaaaatttgaagttgagaaagagaaacagaaagctgaggatgcagctgctggttttgatgttccctcaggcttccagaagaaggtatttgacctcctctacaagattgcggatatttccttcttaaatgcatataaacccaagcttttggatctaattgagaagggagagaaacaaccaaacctcacgattggaatccttgtctccattgtcatcgttttcttgactattatctttaagatcatttttggtgggaagaagccggtgagcaaacaaataactcaacagttgctgagacatcaaatgatcaaggaagcagcagagagaaagaagaagagaatgaggaggaagatactaatgctcctcctcgaaagaggtctacgaggcgcgaaaattgatttaaaaggaaaaaattag

SEQ ID NO: 243 - protein, 542 aa, Vitis vinifera
MGEGKRVSLLPLYVVFAVIACASLQLCASDSIFYESFDDDFEGRWIVSEKEDYKGVWKHAKSDGHEDHGLLVSEKARKYAIVKELDEAVSLKDGTAVLQFETRLQNGLECGGAYLKYLRPQDATWKSKEFDNESPYSIMFGPDKCGSTNKVHFIVKHKNPKSGEYIEHHLKYPPSVPSDKLSHVYTAILKPDHEVRILIDGEEKKKANFLSSEDFEPPFIPAKTIPDPDDKKPEDWDERPKIPDPNAVKPDDWDEDAPMEIEDEEAVKPEGWLDDEPEEIDDPEASKPEDWDDEEDGEWEAPKIDNPKCEIAPGCGEWKKPLKRNPAYKGKWHAPLIDNPNYKGIWKPQQIPNPDYFELDHPDIEPVAAIGIEIWTMQDGILFDNILITSDEKTAESYRETTWKPKFEVEKEKQKAEDAAAGFDVPSGFQKKVFDLLYKIADISFLNAYKPKLLDLIEKGEKQPNLTIGILVSIVIVFLTIIFKIIFGGKKPVSKQITQQLLRHQMIKEAAERKKKRMRRKILMLLLERGLRGAKIDLKGKN

SEQ ID NO: 244 - DNA, 1599 bp, Zea mays
atgggagggcgcgcgctcctcctcctcctggtctcggcgttggtctttcagatccacgcctccgacccgctgctgtacgagccgttcgatgaggactttgaggggagatgggtcgtctccaagaaggatgaataccaaggtgtgtggaagcatgccaagagtgatggtcatgaggactatggcctccttgttagtgacaaagcaaggaaatacgccataatcaaggagcttgatgagccagttaccttaaatgatgggacagtggtcctgcagtttgaagtgagacttcagaatggccttgaatgtggaggtgcctacattaagtacatccgccctcaggatgctggatgggatgccaaggagtttgataatgagactccatacactattatgtttggtccagataaatgtgggtcaaccaacaaggttcatttcatccttaagcacaagaatcctaagactggaaagtatgttgagcatcacctcaaattcccaccttctgtcccatacgacaagctctctcatgtctacacagctatcttgaagccagacaatgaggtcagaattttgatcgatggggaagaaaagaagaaggcgaacttcctttctgctgatgactttgagccagcacttatcccatccaagaccattcctgaccctgatgacaagaagccggaggactgggatgagagagctaaaattcctgatccagatgcagtaaagcctgatgactgggatgaggatgccccgatggaaattgtggatgaggaagccaccaagcctgagggatggttggatgatgaacctgaggagattgatgatcctgaggcagccaagcctgaggactgggacgatgaggaggatggtgaatgggaggcgccaaagattgacaaccccaagtgtgaagaggcacctggatgtggcgagtggaagaggccaatgaagcagaatcctgcttacaagggcaagtggcatgcacctatgattgacaaccccaactacaagggaatctggaagcctcaggagatccccaaccctgagtactttgagcttgacaagcctgactttgatccaattgctgctattgggattgagatctggacaatgcaggatggcatcctgtttgacaatatcttgattgctgacgatgagaaagttgccacctccattctggagaagacctggaagcccaagtatgatgttgagaaggaaaaggagaaggctgaggaggctgctgctggtgcagatggtctttctgacttccagaagaagatttttgacgtcctgtacaagattgctgatgttccgttcttggcaccctacaagaccaagatcattgatgttatcgagaagggagagaagcagcccaacatcactattggcattctggtctccgttgtcgtcgtgttcgttaccgttctcttcaagatcctgtttggaggcaagaagccggtggcacctgtgaaacctgcagctgaggcgaagaagcccaaggccacagtgaccgacggtgctggaagcagtggcgacaaggatgagaaagaggacgaaaaggaggagacagcaggcccacgtcggaggacccgaagggagacatag

SEQ ID NO: 245 - protein, 532 aa, Zea mays
MGGRALLLLLVSALVFQIHASDPLLYEPFDEDFEGRWVVSKKDEYQGVWKHAKSDGHEDYGLLVSDKARKYAIIKELDEPVTLNDGTVVLQFEVRLQNGLECGGAYIKYIRPQDAGWDAKEFDNETPYTIMFGPDKCGSTNKVHFILKHKNPKTGKYVEHHLKFPPSVPYDKLSHVYTAILKPDNEVRILIDGEEKKKANFLSADDFEPALIPSKTIPDPDDKKPEDWDERAKIPDPDAVKPDDWDEDAPMEIVDEEATKPEGWLDDEPEEIDDPEAAKPEDWDDEEDGEWEAPKIDNPKCEEAPGCGEWKRPMKQNPAYKGKWHAPMIDNPNYKGIWKPQEIPNPEYFELDKPDFDPIAAIGIEIWTMQDGILFDNILIADDEKVATSILEKTWKPKYDVEKEKEKAEEAAAGADGLSDFQKKIFDVLYKIADVPFLAPYKTKIIDVIEKGEKQPNITIGILVSVVVVFVTVLFKILFGGKKPVAPVKPAAEAKKPKATVTDGAGSSGDKDEKEDEKEETAGPRRRTRRET

SEQ ID NO: 246 - DNA, 1599 bp, Zea mays
atgatgggagggcgcgctctgctgctgctcctggtctcggcgctgctcgttcagatccgcgcctctgacccgctgctgtacgagccgtttgatgaggacttcgagggtagatggatcgtctccaagaaggatgaataccaaggtgtatggaagcatgccaagagtgatgggcatgaggactatggcctccttgttagtgacaaggcaaggaaatacgccataatcaaggagcttgatgagccagttaccttaaatgatgggacagtggtcctgcagtttgaagtgagacttcagaatggccttgaatgtggaggtgcctacattaagtacatccgccctcaggatgctggatgggatgccaaggagtttgataatgagactccatacactattatgtttggtccagataaatgtgggtcaaccaacaaggttcatttcatccttaagcacaagaatcctaagactggaaagtatgttgagcatcacctcaaattcccaccttctgtcccatacgacaagctctctcatgtctacacagctatcttgaagccagacaatgaggtcagaattttgatcgatggggaagaaaagaagaaggcgaacttcctttctgctgatgactttgagccagcacttatcccatccaagaccattcctgaccctgatgacaagaagccggaggactgggatgagagagctaaaatccctgatccagatgcagtgaagcctgatgattgggatgaggatgcccccatggaaattgtggatgaggaagccaccaagcctgagggatggttggatgatgaacccgaggagattgatgatcctgaggcagccaagcccgaggactgggacgatgaagaggatggtgaatgggaggcaccaaagattgacaaccccaggtgtgaagaagcacctggatgtggcgagtggaagaggccgatgaagcagaatcctgcttacaaaggcaagtggcatgcacctatgattgacaaccccaactacaagggaatctggaagcctcaggagatacccaaccctgagtactttgagcttgacaggcctgattttgatccaattgctgctattgggattgagatctggacaatgcaggatggcatcctgttcgacaatatcttgattactgatgatgagaaagttgccacctccattctcgagaagacctggaagcccaagtatgatgttgagaaggaaaaggagaaggctgaggaggctgctgctggtgcagatggtctttctgacttccagaagaagatttttgacgtcctgtacaagattgctgatattccgttcttggcaccctacaagaccaagattattgatgttatcgagaagggagagaaacagcccaacatcactattggcattttggtctccgttgtcatcgtgttcgttaccgttctcttcaagctcctgtttggtggcaagaaaccagtggcacctgtgaaacctgcagctgaggcgaagaagcccaaggccgcggagacggacggtgctggaagcagtggtgacaaggatgagaaagaggatgaaaaggaggagacaggcccacgtcggaggacccgaagggagacatag

SEQ ID NO: 247 - protein, 532 aa, Zea mays
MMGGRALLLLLVSALLVQIRASDPLLYEPFDEDFEGRWIVSKKDEYQGVWKHAKSDGHEDYGLLVSDKARKYAIIKELDEPVTLNDGTVVLQFEVRLQNGLECGGAYIKYIRPQDAGWDAKEFDNETPYTIMFGPDKCGSTNKVHFILKHKNPKTGKYVEHHLKFPPSVPYDKLSHVYTAILKPDNEVRILIDGEEKKKANFLSADDFEPALIPSKTIPDPDDKKPEDWDERAKIPDPDAVKPDDWDEDAPMEIVDEEATKPEGWLDDEPEEIDDPEAAKPEDWDDEEDGEWEAPKIDNPRCEEAPGCGEWKRPMKQNPAYKGKWHAPMIDNPNYKGIWKPQEIPNPEYFELDRPDFDPIAAIGIEIWTMQDGILFDNILITDDEKVATSILEKTWKPKYDVEKEKEKAEEAAAGADGLSDFQKKIFDVLYKIADIPFLAPYKTKIIDVIEKGEKQPNITIGILVSVVIVFVTVLFKLLFGGKKPVAPVKPAAEAKKPKAAETDGAGSSGDKDEKEDEKEETGPRRRTRRET

SEQ ID NO: 248 - DNA, 1605 bp, Zea mays
atgggagggcgcgcgctcctcctcctcctcctggtctcggcgttggtctttcagatccacgcctccgacccgctgctgtacgagccgttcgatgaggactttgaggggagatgggtcgtctccaagaaggatgaataccaaggtgtgtggaggcatgccaagagtgatggtcatgaggactatggcctccttgttagtgagaaggcaaggaaatacgccataatcaaggagcttgatgagccagttaccttgaaggatgggacagtggtcctgcagtttgaagtgagacttcagaatggccttgaatgcggaggtgcctacattaagtacatccgccctcaggatgctggatgggatgccaaggagtttgataatgagactccatacactattatgtttggtccagataagtgtggatcaaccaacaaggttcatttcatccttaagcacaagaatcctaagactggaaagtatgttgagcatcatctcaaattcccaccatctgtcccatatgacaagctctctcatgtctacacggctatcttgaagccagacaatgaggtcaaaattttggtagatggggaagaaaagaagaaggcgaacttcctttctgctgatgattttgagccagcacttatcccatccaagaccattcctgaccctgatgacaagaagccggaggactgggatgagagagctaaaattcctgatccagatgcagtaaagcctgatgactgggatgaggatgccccgatggaaattgtggatgatgaagccaccaagcctgagggatggttggatgatgaacctgaggagattgatgatcctgaggcagccaagcctgaggactgggacgatgaggaggatggtgaatgggaggcgccaaagattgacaaccccaagtgtgaagaggcacctggatgtggcgagtggaagaggccaatgaagcagaatcctgcttacaagggcaagtggcatgcacctatgattgacaaccccaactacaagggaatctggaagcctcaggagatccccaaccctgagtactttgagcttgacaagcctgactttgatccaattgctgctattgggattgagatctggacaatgcaggatggcatcctgtttgacaatatcttgattgctgacgatgagaaggttgccacctccattctggagaagacctggaagcccaagtatgatgttgagaaggaaaaggagaaggctgaggaggaggctgctgctggtgcagatggtctttctgagttccagaagaagatttttgacgtcctgtacaagattgctgatgttccgttcttggcaccctacaaaaccaagatcattgatgttatcgagaagggagagaagcagcccaacatcactattggcattctggtctccgttgtcgtcgtgttcgttaccgttctcttcaagatcctgtttggaggcaagaagccggtggcacctgtgaaacctgcagctgaggcgaagaagcccaaggccacagtgaccgacggtgctggaagcagtggcgacaaggatgagaaagaggacgaaaaggaggagacagcaggcccacgtcggaggacccgaagggagacatag

SEQ ID NO: 249 - protein, 534 aa, Zea mays
MGGRALLLLLLVSALVFQIHASDPLLYEPFDEDFEGRWVVSKKDEYQGVWRHAKSDGHEDYGLLVSEKARKYAIIKELDEPVTLKDGTVVLQFEVRLQNGLECGGAYIKYIRPQDAGWDAKEFDNETPYTIMFGPDKCGSTNKVHFILKHKNPKTGKYVEHHLKFPPSVPYDKLSHVYTAILKPDNEVKILVDGEEKKKANFLSADDFEPALIPSKTIPDPDDKKPEDWDERAKIPDPDAVKPDDWDEDAPMEIVDDEATKPEGWLDDEPEEIDDPEAAKPEDWDDEEDGEWEAPKIDNPKCEEAPGCGEWKRPMKQNPAYKGKWHAPMIDNPNYKGIWKPQEIPNPEYFELDKPDFDPIAAIGIEIWTMQDGILFDNILIADDEKVATSILEKTWKPKYDVEKEKEKAEEEAAAGADGLSEFQKKIFDVLYKIADVPFLAPYKTKIIDVIEKGEKQPNITIGILVSVVVVFVTVLFKILFGGKKPVAPVKPAAEAKKPKATVTDGAGSSGDKDEKEDEKEETAGPRRRTRRET

SEQ ID NO: 250 - DNA, 1710 bp, Zea mays
atggctgatgcggcggcgggtgcggcgctaggcctcagcttctcttcgatctccgcaagagcgagatggggaaggtttcgaggaactcccgggctcgaggagatcgggacgatgatgggagggcgcgctctgctgctgctcctggtctcggcgctgctcgttcagatccgcgcctctgacccgctgctgtacgagccgttcgatgaggacttcgagggaagatggatcgtctccaagaaggatgaataccaaggtgtatggaagcatgccaagagtgatgggcatgaggactatggtctccttgttagtgacaaagcaaggaaatacgccataatcaaggagcttgatgagccagttaccttaaatgatgggacagtggtcctgcagtttgaagtgagacttcagaatggccttgaatgtggaggtgcctacattaagtacatccgccctcaggatgctggatgggatgccaaggagtttgataatgagactccatacactattatgtttggtccagataaatgtgggtcaaccaacaaggttcatttcatccttaagcacaagaatcctaagactggaaagtatgttgagcatcacctcaaattcccaccttctgtcccatacgacaagctctctcatgtctacacagctatcttgaagccagacaatgaggtcagaattttgatcgatggggaagaaaagaagaaggcgaacttcctttctgctgatgactttgagccagcacttatcccatccaagaccattcctgaccctgatgacaagaagccggaggactgggatgagagagctaaaatccctgatccagatgcagtgaagcctgatgattgggatgaggatgcccccatggaaattgtggatgaggaagccaccaagcctgagggatggttggatgatgaacccgaggagattgatgatcctgaggcagccaagcccgaggactgggacgatgaagaggatggtgaatgggaggcaccaaagattgacaaccccaggtgtgaagaggcacctggatgtggcgagtggaagaggccgatgaagcagaatcctgcttacaaaggcaagtggcatgcacctatgattgacaaccccaactacaagggaatctggaagcctcaggagatacccaaccctgagtactttgagcttgacaggcctgattttgatccaattgctgctattgggattgagatctggacaatgcaggatggcatcctgttcgacaatatcttgattactgatgatgagaaagttgccacctccattctcgagaagacctggaagcccaagtatgatgttgagaaggaaaaggagaaggctgaggaggctgctgctggtgcagatggtctttctgacttccagaagaagatttttgacgtcctgtacaagattgctgatattccgttcttggcaccctacaagaccaagattattgatgttatcgagaagggagagaaacagcccaacatcactattggcattttggtctccgttgtcatcgtgttcgttaccgttctctgcaagctcctgtttggtggcaagaaaccagtggcacctgtgaaacctgcagctgaggcgaagaagcccaaggccgcggagacggacggtgctggaagcagtggtgacaaggatgagaaagaggatgaaaaggaggagacaggcccacgtcggaggacccgaagggagacatag

SEQ ID NO: 251 - protein, 569 aa, Zea mays
MADAAAGAALGLSFSSISARARWGRFRGTPGLEEIGTMMGGRALLLLLVSALLVQIRASDPLLYEPFDEDFEGRWIVSKKDEYQGVWKHAKSDGHEDYGLLVSDKARKYAIIKELDEPVTLNDGTVVLQFEVRLQNGLECGGAYIKYIRPQDAGWDAKEFDNETPYTIMFGPDKCGSTNKVHFILKHKNPKTGKYVEHHLKFPPSVPYDKLSHVYTAILKPDNEVRILIDGEEKKKANFLSADDFEPALIPSKTIPDPDDKKPEDWDERAKIPDPDAVKPDDWDEDAPMEIVDEEATKPEGWLDDEPEEIDDPEAAKPEDWDDEEDGEWEAPKIDNPRCEEAPGCGEWKRPMKQNPAYKGKWHAPMIDNPNYKGIWKPQEIPNPEYFELDRPDFDPIAAIGIEIWTMQDGILFDNILITDDEKVATSILEKTWKPKYDVEKEKEKAEEAAAGADGLSDFQKKIFDVLYKIADIPFLAPYKTKIIDVIEKGEKQPNITIGILVSVVIVFVTVLCKLLFGGKKPVAPVKPAAEAKKPKAAETDGAGSSGDKDEKEDEKEETGPRRRTRRET

SEQ ID NO: 252 - DNA, 1599 bp, Zea mays
atgatgggagggcgcgctctgctgctgctcctggtctcggcgctgctcgttcagatccgcgcctctgacccgctgctgtacgagccgttcgatgaggacttcgagggaagatggatcgtctccaagaaggatgaataccaaggtgtatggaagcatgccaagagtgatgggcatgaggactatggtctccttgttagtgacaaagcaaggaaatacgccataatcaaggagcttgatgagccagttaccttaaatgatgggacagtggtcctgcagtttgaagtgagacttcagaatggccttgaatgtggaggtgcctacattaagtacatccgccctcaggatgctggatgggatgccaaggagtttgataatgagactccatacactattatgtttggtccagataaatgtgggtcaaccaacaaggttcatttcatccttaagcacaagaatcctaagactggaaagtatgttgagcatcacctcaaattcccaccttctgtcccatacgacaagctctctcatgtctacacagctatcttgaagccagacaatgaggtcagaattttgatcgatggggaagaaaagaagaaggcaaacttcctttctgctgatgactttgagccagcacttatcccatccaagaccattcctgaccctgatgacaagaagccggaggactgggatgagagagctaaaatccctgatccagatgcagtgaagcctgatgattgggatgaggatgcccccatggaaattgtggatgaggaagccaccaagcctgagggatggttggatgatgaacccgaggagattgatgatcctgaggcagccaagcccgaggactgggacgatgaagaggatggtgaatgggaggcaccaaagattgacaaccccaagtgtgaagaggcacctggatgtggcgagtggaagaggccgatgaagcagaatcctgcttacaaaggcaagtggcatgcacctatgattgacaaccccaactacaagggaatctggaagcctcaggagatacccaaccctgagtactttgagcttgacaggcctgattttgatccaattgctgctattgggattgagatctggacaatgcaggatggcatcctgttcgacaatatcttgattgctgatgatgagaaagttgccacctccattctggagaagacatggaagcccaagtatgatgttgagaaggaaaaggagaaggctgaggaggctgctgctggtgcagatggtctttctgacttccagaagaagatttttgacgtcctgtacaagattgctgatattccgttcttggcaccctacaagaccaagattattgatgttatcgagaagggagagaagcagcccaacatcactattggcattttggtctccgttgtcatcgtgttcgttaccgttctcttcaagatcctttttggtggcaagaagccggtggcacctgtgaaacctgcagctgaggcgaagaagcccaaggccgcggagacggacggtgctggaagcagtggtgacaaggatgagaaagaggatgaaaaggacgagacaggcccacgtcggaggacccgaagggagacatag

SEQ ID NO: 253 - protein, 532 aa, Zea mays
MMGGRALLLLLVSALLVQIRASDPLLYEPFDEDFEGRWIVSKKDEYQGVWKHAKSDGHEDYGLLVSDKARKYAIIKELDEPVTLNDGTVVLQFEVRLQNGLECGGAYIKYIRPQDAGWDAKEFDNETPYTIMFGPDKCGSTNKVHFILKHKNPKTGKYVEHHLKFPPSVPYDKLSHVYTAILKPDNEVRILIDGEEKKKANFLSADDFEPALIPSKTIPDPDDKKPEDWDERAKIPDPDAVKPDDWDEDAPMEIVDEEATKPEGWLDDEPEEIDDPEAAKPEDWDDEEDGEWEAPKIDNPKCEEAPGCGEWKRPMKQNPAYKGKWHAPMIDNPNYKGIWKPQEIPNPEYFELDRPDFDPIAAIGIEIWTMQDGILFDNILIADDEKVATSILEKTWKPKYDVEKEKEKAEEAAAGADGLSDFQKKIFDVLYKIADIPFLAPYKTKIIDVIEKGEKQPNITIGILVSVVIVFVTVLFKILFGGKKPVAPVKPAAEAKKPKAAETDGAGSSGDKDEKEDEKDETGPRRRTRRET

SEQ ID NO: 254 - protein, 20 aa, Artificial sequence
  motif 4
SPYSIMFGPDKCGATNKVHF

SEQ ID NO: 255 - protein, 20 aa, Artificial sequence
  motif 5
  VARIANT (1)..(1): Xaa can be Thr or Val
  VARIANT (3)..(3): Xaa can be Leu or Phe
  VARIANT (5)..(5): Xaa can be Asn or Glu
  VARIANT (14)..(14): Xaa can be Leu or Ile
XRXQXGLECGGAYXKYLRPQ

SEQ ID NO: 256 - protein, 20 aa, Artificial sequence
  motif 6
  VARIANT (20)..(20): Xaa can be His or Ser
GCGEWKRPMKRNPAYKGKWX

SEQ ID NO: 257 - DNA, 56 bp, Artificial sequence
  primer: prm17919
ggggacaagtttgtacaaaaaagcaggcttaaacaatgagagaagcgaaacgtatc

SEQ ID NO: 258 - DNA, 50 bp, Artificial sequence
  primer: prm17920
ggggaccactttgtacaagaaagctgggtccctctgatctcatctttcag

SEQ ID NO: 259 - DNA, 2194 bp, Oryza sativa; identical to SEQ ID NO: 76

SEQ ID NO: 260 - DNA, 1264 bp, Oryza sativa
tcgacgctactcaagtggtgggaggccaccgcatgttccaacgaagcgccaaagaaagccttgcagactctaatgctattagtcgcctaggatatttggaatgaaaggaaccgcagagtttttcagcaccaagagcttccggtggctagtctgatagccaaaattaaggaggatgccaaaacatgggtcttggcgggcgcgaaacaccttgataggtggcttaccttttaacatgttcgggccaaaggccttgagacggtaaagttttctatttgcgcttgcgcatgtacaattttattcctctattcaatgaaattggtggctcactggttcattaaaaaaaaaagaatctagcctgttcgggaagaagaggattttgttcgtgagagagagagagagagagagagagagagagagagagaaggaggaggaggattttcaggcttcgcattgcccaacctctgcttctgttggcccaagaagaatcccaggcgcccatgggctggcagtttaccacggacctacctagcctaccttagctatctaagcgggccgacctagtagccacgtgcctagtgtagattaaagttgccgggccagcaggaagccacgctgcaatggcatcttcccctgtccttcgcgtacgtgaaaacaaacccaggtaagcttagaatcttcttgcccgttggactgggacacccaccaatcccaccatgccccgatattcctccggtctcggttcatgtgatgtcctctcttgtgtgatcacggagcaagcattcttaaacggcaaaagaaaatcaccaacttgctcacgcagtcacgctgcaccgcgcgaagcgacgcccgataggccaagatcgcgagataaaataacaaccaatgatcataaggaaacaagcccgcgatgtgtcgtgtgcagcaatcttggtcatttgcgggatcgagtgcttcacagctaaccaaatattcggccgatgatttaacacattatcagcgtagatgtacgtacgatttgttaattaatctacgagccttgctagggcaggtgttctgccagccaatccagatcgccctcgtatgcacgctcacatgatggcagggcagggttcacatgagctctaacggtcgattaattaatcccggggctcgactataaatacctccctaatcccatgatcaaaaccatctcaagcagcctaatcatctccagctgatcaagagctcttaattagctagctagtgattagctgcgcttgtgatc
